(19) United States
(12) Patent Application Publication
(10) Pub. No.: US 2015/0141499 A1
(43) Pub. Date: May 21, 2015

(54) ENGINEERED NUCLEIC ACIDS AND METHODS OF USE THEREOF

(71) Applicant: MODERNA THERAPEUTICS, INC., CAMBRIDGE, MA (US)

(72) Inventors: Stephane Bancel, Cambridge, MA (US); Jason P. Schrum, Philadelphia, PA (US); Alexander Aristarkhov, Chestnut Hill, MA (US)

(21) Appl. No.: 14/608,555

(22) Filed: Jan. 29, 2015

Related U.S. Application Data
(63) Continuation of application No. 14/343,927, now abandoned.
(60) Provisional application No. 61/533,554, filed on Sep. 12, 2011.

(51) Int. Cl. A61K 48/00; A61K 45/06

(52) U.S. Cl. CPC A61K 48/005; A61K 45/06
USPC 514/44 R

(57) ABSTRACT

Provided are compositions and methods for delivering biological moieties such as modified nucleic acids into cells to kill or reduce the growth of viruses. Such compositions and methods include the use of modified messenger RNAs, and are useful to treat or prevent viral infection, or to improve a subject's heath or wellbeing.

### CROSS REFERENCE TO RELATED APPLICATIONS

[0001] This application is a continuation of U.S. application Ser. No. 14/343,927 filed Mar. 10, 2014 which is a 35 U.S.C. §371 U.S. National Stage Entry of International Application No. PCT/US2012/054574, filed Sep. 11, 2012, which claims the benefit of priority of U.S. Provisional Application No. 61/533,554, filed Sep. 12, 2011, entitled Engineered Nucleic Acids and Methods of Use Thereof, the contents of which is incorporated by reference in its entirety.

### REFERENCE TO THE SEQUENCE LISTING

[0002] The present application is being filed along with a Sequence Listing in electronic format. The Sequence Listing is provided as a file entitled M007USCON_SQLST.txt created on Jan. 27, 2015 which is 835,165 bytes in size. The information in electronic format of the sequence listing is incorporated herein by reference in its entirety.

### REFERENCE TO LENGTHY TABLE

[0003] The specification includes a lengthy Table 1. Lengthy Table 1 has been submitted via EFS-Web in electronic format as follows: File name: M007TBL.txt, Date created: Mar. 10, 2014; File size: 206,497 Bytes and is incorporated herein by reference in its entirety. Please refer to the end of the specification for access instructions.

LENGTHY TABLES
The patent application contains a lengthy table section. A copy of the table is available in electronic form from the USPTO web site (http://seqdata.uspto.gov/?pageRequest=docDetail&DocID=US20150141499A1). An electronic copy of the table will also be available from the USPTO upon request and payment of the fee set forth in 37 CFR 1.19(b)(3).

### BACKGROUND OF THE INVENTION

[0004] Naturally occurring RNAs are synthesized from four basic ribonucleotides: ATP, CTP, UTP and GTP, but may contain post-transcriptionally modified nucleotides. Further, over one hundred natural nucleotide modifications have been identified in all RNA species (Rozenski, J, Crain, P, and McCloskey, J. (1999). The RNA Modification Database: 1999 update. Nucl Acids Res 27: 196-197). Nucleotides are modified in RNA to alter functional, structural, or catalytic roles of the parent RNA molecule. More recently, nucleotide modifications have been described to play a role in differentiating host cell RNA species from invading pathogenic RNA species. However, the precise mechanism by which nucleotide modifications alter the host immune response machinery and subsequently affect the translation efficiency of mRNA is unclear.

[0005] There is a need in the art for biological modalities to address the modulation of intracellular translation of nucleic acids.

[0006] Unless explained otherwise, all technical and scientific terms used herein have the same meaning as commonly understood to one of ordinary skill in the art to which this disclosure belongs. Although methods and materials similar or equivalent to those described herein can be used in the practice or testing of the present disclosure, suitable methods and materials are described herein. The materials, methods, and examples are illustrative only and not intended to be limiting. Other features of the disclosure are apparent from the following detailed description and the claims.

### SUMMARY OF THE INVENTION

[0007] Provided herein are modified nucleic acids encoding anti-viral polypeptides (AVPs), e.g., anti-viral polypeptides described herein, precursors thereof, or partially or fully processed forms of these precursors. In certain embodiments, the anti-viral polypeptide has one or more of anti-bacterial, anti-fungal, anti-protozoal, anti-tumor/cancer, anti-parasitic, or anti-prion activity. In certain embodiments, the modified nucleic acids comprise mRNA. In particular embodiments, the modified mRNA (mmRNA) is derived from cDNA. In certain embodiments, the mmRNA comprises at least two nucleoside modifications. In certain embodiments, these nucleoside modifications are 5-methylcytosine and pseudouridine.

[0008] Provided herein are isolated nucleic acids (e.g., modified mRNAs encoding an anti-viral polypeptide described herein) comprising a translatable region and at least two different nucleoside modifications, wherein the nucleic acid exhibits reduced degradation in a cell into which the nucleic acid is introduced, relative to a corresponding unmodified nucleic acid. For example, the degradation rate of the nucleic acid is reduced by at least 10%, 20%, 30%, 40%, 50%, 60%, 70%, 80%, or 90%, compared to the degradation rate of the corresponding unmodified nucleic acid. In certain embodiments, the nucleic acids comprise RNA, DNA, TNA, GNA, or a hybrid thereof. In certain embodiments, the nucleic acids comprise messenger RNA (mRNA). In certain embodiments, the mRNA does not substantially induce an innate immune response of the cell into which the mRNA is introduced. In certain embodiments, the mRNA comprises at least one nucleoside selected from the group consisting of pyridin-4-one ribonucleoside, 5-aza-uridine, 2-thio-5-aza-uridine, 2-thiouridine, 4-thio-pseudouridine, 2-thio-pseudouridine, 5-hydroxyuridine, 3-methyluridine, 5-carboxymethyl-uridine, 1-carboxymethyl-pseudouridine, 5-propynyl-uridine, 1-propynyl-pseudouridine, 5-taurinomethyluridine, 1-taurinomethyl-pseudouridine, 5-taurinomethyl-2-thio-uridine, 1-taurinomethyl-4-thio-uridine, 5-methyl-uridine, 1-methyl-pseudouridine, 4-thio-1-methyl-pseudouridine, 2-thio-1-methyl-pseudouridine, 1-methyl-1-deaza-pseudouridine, 2-thio-1-methyl-1-deaza-pseudouridine, dihydrouridine, dihydropseudouridine, 2-thio-dihydrouridine, 2-thio-dihydropseudouridine, 2-methoxyuridine, 2-methoxy-4-thio-uridine, 4-methoxy-pseudouridine, and 4-methoxy-2-thio-pseudouridine. In certain embodiments, the mRNA comprises at least one nucleoside selected from the group consisting of 5-aza-cytidine, pseudoisocytidine, 3-methyl-cytidine, N4-acetylcytidine, 5-formylcytidine, N4-methylcytidine, 5-hydroxymethylcytidine, 1-methyl-pseudoisocytidine, pyrrolo-cytidine, pyrrolo-pseudoisocytidine, 2-thio-cytidine, 2-thio-5-methyl-cytidine, 4-thio-pseudoisocytidine, 4-thio-1-methyl-pseudoisocytidine, 4-thio-1-methyl-1-deaza-pseudoisocytidine, 1-methyl-1-deaza-pseudoisocytidine, zebularine, 5-aza-zebularine, 5-methyl-zebularine, 5-aza-2-thio-zebularine, 2-thio-zebularine, 2-methoxy-cytidine, 2-methoxy-5-methyl-cytidine, 4-methoxy-pseudoisocytidine, and 4-methoxy-1-methyl-pseudoisocytidine. In other embodiments, the mRNA comprises at least one nucleoside selected from the group consisting of 2-aminopurine, 2,6-diaminopurine, 7-deaza-adenine, 7-deaza-8-aza-adenine, 7-deaza-2-aminopurine, 7-deaza-8-aza-2-aminopurine, 7-deaza-2,6-diaminopurine, 7-deaza-8-aza-2,6-diaminopurine, 1-methyladenosine, N6-methyladenosine, N6-isopentenyladenosine, N6-(cis-hydroxyisopentenyl)adenosine, 2-methylthio-N6-(cis-hydroxyisopentenyl) adenosine, N6-glycinylcarbamoyladenosine, N6-threonylcarbamoyladenosine, 2-methylthio-N6-threonyl carbamoyladenosine, N6,N6-dimethyladenosine, 7-methyladenine, 2-methylthio-adenine, and 2-methoxy-adenine. In yet other embodiments, the mRNA comprises at least one nucleoside selected from the group consisting of inosine, 1-methyl-inosine, wyosine, wybutosine, 7-deaza-guanosine, 7-deaza-8-aza-guanosine, 6-thio-guanosine, 6-thio-7-deaza-guanosine, 6-thio-7-deaza-8-aza-guanosine, 7-methyl-guanosine, 6-thio-7-methyl-guanosine, 7-methylinosine, 6-methoxy-guanosine, 1-methylguanosine, N2-methylguanosine, N2,N2-dimethylguanosine, 8-oxo-guanosine, 7-methyl-8-oxo-guanosine, 1-methyl-6-thio-guanosine, N2-methyl-6-thio-guanosine, and N2,N2-dimethyl-6-thio-guanosine.

[0009] In some embodiments, the nucleic acids provided herein comprise a 5′ untranslated region (UTR) and/or a 3′UTR, wherein each of the two different nucleoside modifications are independently present in the 5′UTR and/or 3′UTR. In some embodiments, nucleic acids are provided herein, wherein at least one of the two different nucleoside modifications are present in the translatable region. In some embodiments, nucleic acids provided herein are capable of binding to at least one polypeptide that prevents or reduces an innate immune response of a cell into which the nucleic acid is introduced.

[0010] Further provided herein are isolated nucleic acids (e.g., modified mRNAs described herein) comprising (i) a translatable region encoding an anti-viral polypeptide, e.g., an anti-viral polypeptide described herein, (ii) at least one nucleoside modification, and (iii) at least one intronic nucleotide sequence capable of being excised from the nucleic acid.

[0011] Further provided herein are isolated nucleic acids (e.g., modified mRNAs described herein) comprising (i) a translatable region encoding an anti-viral polypeptide, e.g., an anti-microbial polypeptide described herein, (ii) at least two different nucleoside modifications, and (iii) a degradation domain.

[0012] Further provided herein are isolated nucleic acids (e.g., modified mRNAs described herein) comprising i) a translatable region encoding an anti-viral polypeptide, e.g., an anti-viral polypeptide described herein, and ii) at least two different nucleoside modifications, wherein the translatable region encodes a polypeptide variant having an altered activity relative to a reference polypeptide. In certain embodiments, isolated mRNAs are provided, wherein the altered activity comprises an increased activity or wherein the altered activity comprises a decreased activity.

[0013] Further provided herein are non-enzymatically synthesized nucleic acids (e.g., modified mRNAs described herein) comprising at least one nucleoside modification, and comprising a translatable region encoding an anti-viral polypeptide, e.g., an anti-viral polypeptide described herein. In certain embodiments, the non-enzymatically synthesized mRNA comprise at least two different nucleoside modifications.

[0014] Further provided herein are isolated nucleic acids (e.g., modified mRNAs described herein) comprising a noncoding region and at least one nucleoside modification that reduces an innate immune response of a cell into which the nucleic acid is introduced, wherein the nucleic acid sequesters one or more translational machinery components. In certain embodiments, the isolated nucleic acids comprising a noncoding region and at least one nucleoside modification described herein are provided in an amount effective to reduce protein expression in the cell. In certain embodiments, the translational machinery component is a ribosomal protein or a transfer RNA (tRNA). In certain embodiments, the nucleic acid comprises a small nucleolar RNA (sno-RNA), microRNA (miRNA), small interfering RNA (siRNA) or Piwi-interacting RNA (piRNA).

[0015] Further provided herein are isolated nucleic acids (e.g., modified mRNAs described herein) comprising (i) a first translatable region, (ii) at least one nucleoside modification, and (iii) an internal ribosome entry site (IRES). In certain embodiments, the IRES is obtained from a picornavirus, a pest virus, a polio virus, an encephalomyocarditis virus, a foot-and-mouth disease virus, a hepatitis C virus, a classical swine fever virus, a murine leukemia virus, a simian immune deficiency virus or a cricket paralysis virus. In certain embodiments, the isolated nucleic acid further comprises a second translatable region. In certain embodiments, the isolated nucleic acid further comprises a Kozak sequence. In some embodiments, the first translatable region encodes an anti-viral polypeptide, e.g., an anti-viral polypeptide described herein. In some embodiments, the second translatable region encodes an anti-viral polypeptide, e.g., an anti-viral polypeptide described herein. In some embodiments, the first translatable region encodes an anti-viral polypeptide, e.g., an anti-viral polypeptide described herein. In some embodiments, the first and the second translatable regions encode anti-viral polypeptides, e.g., anti-viral polypeptides described herein.

[0016] Further, provided herein are compositions (e.g., pharmaceutical compositions) comprising the modified nucleic acids described herein. In certain embodiments, the composition further comprises a pharmaceutically acceptable carrier. In certain embodiments, the composition is formulated for systemic or local administration. In certain embodiments, the composition is formulated for intravenous administration. In certain embodiments, the composition is formulated for oral administration. In certain embodiments, the composition is formulated for topical administration. In certain embodiments, the composition is formulated for administration via a dressing (e.g., wound dressing). In certain embodiments, the composition is formulated for administration via a bandage (e.g., adhesive bandage). In certain embodiments, the composition is formulated for administration by inhalation. In certain embodiments, the composition is formulated for rectal administration. In certain embodiments, the composition is formulated for vaginal administration. In certain embodiments, the compositions comprise naked modified nucleic acids. In other embodiments, the modified nucleic acid is complexed or encapsulated. In another embodiment, the administration of the composition described herein may be administered at least once.

[0017] Provided herein are pharmaceutical compositions comprising: (i) an effective amount of a synthetic messenger ribonucleic acid (mRNA) encoding an anti-viral polypeptide, e.g., an anti-viral polypeptide described herein; and (ii) a pharmaceutically acceptable carrier, wherein i) the mRNA comprises pseudouridine, 5′methyl-cytidine or a combination thereof, or ii) the mRNA does not comprise a substantial amount of a nucleotide or nucleotides selected from the group consisting of uridine, cytidine, and a combination of uridine and cytidine, and wherein the composition is suitable for repeated intravenous administration to a mammalian subject in need thereof. In some embodiments, the anti-viral polypeptide is under 10 kDa, e.g., under 8 kDa, 6 kDa, 4 kDa, 2 kDa, or 1 kDa. In some embodiments, the anti-viral polypeptide comprises or consists of from about 6 to about 100 amino acids, e.g., from about 6 to about 75 amino acids, about 6 to about 50 amino acids, about 6 to about 25 amino acids, about 25 to about 100 amino acids, about 50 to about 100 amino acids, or about 75 to about 100 amino acids. In certain embodiments, the anti-viral polypeptide comprises or consists of from about 15 to about 45 amino acids. In some embodiments, the anti-viral polypeptide is substantially cationic. In some embodiments, the anti-viral polypeptide is substantially amphipathic. In certain embodiments, the anti-viral polypeptide is substantially cationic and amphipathic. In some embodiments, the anti-viral polypeptide is cytostatic to a virus. In some embodiments, the anti-viral polypeptide is cytotoxic to a virus. In some embodiments, the anti-viral polypeptide is cytostatic and cytotoxic to a virus. In some embodiments, the anti-viral polypeptide is cytostatic to a bacterium, fungus, protozoan, parasite, prion, or combination thereof. In some embodiments, the anti-viral polypeptide is cytotoxic to a bacterium, fungus, protozoan, parasite, prion, or combination thereof. In certain embodiments, the anti-viral polypeptide is cytostatic and cytotoxic to a bacterium, fungus, protozoan, parasite, prion, or a combination thereof. In some embodiments, the anti-viral polypeptide is cytotoxic to a tumor or cancer cell (e.g., a human cancer cell). In some embodiments, the anti-viral polypeptide is cytostatic to a tumor or cancer cell (e.g., a human cancer cell). In certain embodiments, the anti-viral polypeptide is cytotoxic and cytostatic to a tumor or cancer cell (e.g., a human cancer cell). In some embodiments, the anti-viral polypeptide is a secreted polypeptide. In certain embodiments, the anti-viral polypeptide is selected from the group consisting of anti-viral polypeptides and/or SEQ ID NOs: 1-1762. In certain embodiments, the anti-viral polypeptide comprises or consists of enfuvirtide (SEQ ID NO: 30). In some embodiments, the composition (e.g., pharmaceutical composition) provided herein further comprises a lipid-based transfection reagent. In some embodiments, the synthetic messenger ribonucleic acid (mRNA) encoding an anti-viral polypeptide, e.g., an anti-viral polypeptide described herein, lacks at least one destabilizing element.

[0018] Further provided herein are pharmaceutical compositions comprising and/or consisting essentially of: (i) an effective amount of a synthetic messenger ribonucleic acid (mRNA) encoding an anti-viral polypeptide, e.g., an anti-viral polypeptide described herein; (ii) a cell penetration agent; and (iii) a pharmaceutically acceptable carrier, wherein i) the mRNA comprises pseudouridine, 5′methyl-cytidine or a combination thereof, or ii) the mRNA does not comprise a substantial amount of a nucleotide or nucleotides selected from the group consisting of uridine, cytidine, and a combination of uridine and cytidine, and wherein the composition is suitable for repeated intravenous administration to a mammalian subject in need thereof.

[0019] Provided herein are methods of treating a subject having and/or being suspected of having a viral infection and/or a disease, disorder, or condition, e.g., a disease, disorder, or condition associated with a viral infection, the methods comprising administering to a subject in need of such treatment a composition described herein in an amount sufficient to treat the viral infection and/or disease, disorder, or condition. In specific embodiments, the disease, disorder, or condition is associated with one or more cellular and/or molecular changes affecting, for example, the level, activity, and/or localization of an anti-viral polypeptide, e.g., an anti-viral polypeptide described herein, precursors thereof, or a partially or fully processed form of these precursors. In certain embodiments, the methods of treating a subject having or being suspected of having a viral infection and/or a disease, disorder, or condition, e.g., a disease, disorder, or condition associated with a viral infection, comprise administering to the subject in need of such treatment a composition comprising a modified nucleic acid described herein in an amount sufficient to kill or reduce the growth of viruses, and/or to modulate one or more activities associated with, therefore to treat the viral infection and/or disease, disorder, or condition in the subject.

[0020] Further provided herein are methods of treating or preventing a viral infection of a target animal cell (e.g., mammalian cell), comprising the step of contacting the target animal cell (e.g., mammalian cell) with a composition comprising a synthetic messenger ribonucleic acid (mRNA) encoding an anti-viral polypeptide in an amount effective to be cytostatic and/or cytotoxic to one or more viruses infecting the target animal cell (e.g., mammalian cell). In some embodiments, the composition is effective to be cytostatic and/or cytotoxic to one or more viruses adjacent to the target animal cell (e.g., mammalian cell). In some embodiments, the target animal cell (e.g., mammalian cell) is present in an animal subject (e.g., a mammalian subject). In certain embodiments, the subject is a human. In certain embodiments, the subject is a livestock animal. In some embodiments, the composition is administered to the subject by an intravenous route. In certain embodiments, the composition is administered to the subject orally. In certain embodiments, the composition is administered to the subject topically. In certain embodiments, the composition is administered to the subject by inhalation. In certain embodiments, the composition is administered to the subject rectally. In certain embodiments, the composition is administered to the subject vaginally. In certain embodiments, the method further comprises the step of administering an effective amount of an anti-viral agent, e.g., an anti-viral agent described herein, to the subject at the same time or at a different time from the administering the composition, e.g., before or after the administering the composition. In some embodiments, the anti-viral agent is an anti-viral polypeptide, e.g., an anti-viral polypeptide described herein. In some embodiments, the anti-viral agent is a small molecule anti-microbial agent, e.g., a small molecule anti-viral agent described herein. In another embodiment, the administration of the composition described herein may be administered at least once.

[0021] Further provided herein are methods for treating and/or preventing a viral infection and/or a disease, disorder, or condition associated with a viral infection, and/or a symptom thereof, in an animal (e.g., a mammalian) subject, comprising contacting a cell of the subject with a nucleic acid described herein, wherein the translatable region of the nucleic acid encodes an anti-viral polypeptide, under conditions such that an effective amount of the anti-viral polypeptide is present in the cell, thereby treating or preventing a microbial infection (e.g., viral infection) and/or a disease, disorder, or condition associated with the viral infection, and/or a symptom thereof, in the subject. In certain embodiments, the cell is an epithelial cell, an endothelial cell, or a mesothelial cell. In certain embodiments, the nucleic acid comprises an RNA molecule formulated for administration by an intravenous route. In certain embodiments, the nucleic acid comprises an RNA molecule formulated for oral administration. In certain embodiments, the nucleic acid comprises an RNA molecule formulated for topical administration. In certain embodiments, the nucleic acid comprises an RNA molecule formulated for administration by inhalation. In certain embodiments, the nucleic acid comprises an RNA molecule formulated for rectal administration. In certain embodiments, the nucleic acid comprises an RNA molecule formulated for vaginal administration.

[0022] Further provided herein are methods for inducing in vivo translation of a recombinant polypeptide (e.g., an anti-viral polypeptide, e.g., an anti-viral polypeptide described herein) in an animal (e.g., a mammalian) subject in need thereof, comprising the step of administering to the subject an effective amount of a composition comprising a nucleic acid comprising: (i) a translatable region encoding the recombinant polypeptide; and (ii) at least one nucleoside modification, under conditions such that the nucleic acid is localized into a cell of the subject and the recombinant polypeptide is capable of being translated in the cell from the nucleic acid. In certain embodiments, the composition comprises mRNA. In certain embodiments, methods are provided, wherein the recombinant polypeptide comprises a functional activity substantially absent in the cell in which the recombinant polypeptide is translated. In certain embodiments, the recombinant polypeptide comprises a polypeptide substantially absent in the cell in the absence of the composition. In certain embodiments, the recombinant polypeptide comprises a polypeptide that antagonizes the activity of an endogenous protein present in, on the surface of, or secreted from the cell. In certain embodiments, the recombinant polypeptide comprises a polypeptide that antagonizes the activity of a biological moiety present in, on the surface of, or secreted from the cell. In certain embodiments, the biological moiety comprises a lipid, a lipoprotein, a nucleic acid, a carbohydrate, or a small molecule toxin. In certain embodiments, the recombinant polypeptide is capable of being secreted from the cell. In certain embodiments, the recombinant polypeptide is capable of being translocated to the plasma membrane of the cell. In certain embodiments, methods are provided, wherein the composition is formulated for administration intramuscularly, transarterially, intraperitoneally, intravenously, intranasally, subcutaneously, endoscopically, transdermally, or intrathecally. In certain embodiments, methods are provided, wherein the composition is formulated for extended release.

[0023] Further provided herein are methods for inducing translation of a recombinant polypeptide (e.g., an anti-viral polypeptide, e.g., an anti-viral polypeptide described herein) in a cell population, comprising the step of contacting the cell population with an effective amount of a composition comprising a nucleic acid comprising: (i) a translatable region encoding the recombinant polypeptide; and (ii) at least one nucleoside modification, under conditions such that the nucleic acid is localized into one or more cells of the cell population and the recombinant polypeptide is translated in the cell from the nucleic acid. In certain embodiments, methods are provided, wherein the composition comprises mRNA. In certain embodiments, the composition comprises a cell penetrating compound. In certain embodiments, methods are provided, wherein the step of contacting the cell with the composition is repeated one or more times. In certain embodiments, the step of contacting the cell with the composition is repeated a sufficient number of times such that a predetermined efficiency of protein translation in the cell population.

[0024] Further provided herein are methods of reducing the innate immune response of a cell to an exogenous nucleic acid (e.g., a modified mRNA described herein), comprising the steps of: (a) contacting the cell with a first composition comprising a first dose of a first exogenous nucleic acid comprising a translatable region (e.g., encoding an anti-viral polypeptide, e.g., an anti-viral polypeptide described herein) and at least one nucleoside modification; (b) determining the level of the innate immune response of the cell to the first exogenous nucleic acid; (c) contacting the cell with a second composition comprising either: (i) a second dose of the first exogenous nucleic acid, wherein the second dose contains a lesser amount of the first exogenous nucleic acid as compared to the first dose; or (ii) a first dose of a second exogenous nucleic acid, thereby reducing the innate immune response of the cell. In certain embodiments, methods are provided, wherein the step of contacting the cell with the first composition and/or the second composition is repeated one or more times. In certain embodiments, a predetermined efficiency of protein translation in the cell is achieved.

[0025] Provided herein are methods of providing a composition (e.g., a composition described herein) to a target tissue of a subject (e.g., mammalian subject) in need thereof, comprising the step of contacting the target tissue comprising one or more target cells with the composition under conditions such that the composition is substantially retained in the target tissue, and wherein the composition comprises: (a) an effective amount of a ribonucleic acid, wherein the ribonucleic acid is engineered to avoid an innate immune response of a cell into which the ribonucleic acid enters, and wherein the ribonucleic acid comprises a nucleotide sequence encoding a polypeptide of interest, wherein the protein of interest has an anti-viral activity (e.g., an anti-viral polypeptide described herein); (b) optionally, a cell penetration agent; and (c) a pharmaceutically acceptable carrier, under conditions such that the polypeptide of interest is produced in at least one target cell.

[0026] Further provided herein are isolated polypeptides (e.g., anti-viral polypeptides, e.g., anti-viral polypeptides described herein) produced by translation of the mRNAs described herein.

[0027] Further provided herein are isolated complexes comprising a conjugate of a protein and a nucleic acid (e.g., a nucleic acid described herein), comprising (i) an mRNA comprising a translatable region encoding an anti-viral polypeptide, e.g., an anti-viral polypeptide described herein, and at least two different nucleoside modifications; and (ii) one or more polypeptides bound to the mRNA in an amount effective to prevent or reduce an innate immune response of a cell into which the complex is introduced.

[0028] Further provided herein are libraries comprising a plurality of polynucleotides, wherein the polynucleotides individually comprise: (i) a first nucleic acid sequence encoding a polypeptide (e.g., an anti-viral polypeptide, e.g., an anti-viral polypeptide described herein); (ii) at least one nucleoside modification. In certain embodiments, libraries are provided, wherein the polypeptide comprises an antibody or functional portion thereof. In certain embodiments, libraries are provided, wherein the polynucleotides comprise mRNA. In certain embodiments, libraries are provided, wherein the at least one nucleoside modification is selected from the group consisting of pyridin-4-one ribonucleoside, 5-aza-uridine, 2-thio-5-aza-uridine, 2-thiouridine, 4-thio-pseudouridine, 2-thio-pseudouridine, 5-hydroxyuridine, 3-methyluridine, 5-carboxymethyl-uridine, 1-carboxymethyl-pseudouridine, 5-propynyl-uridine, 1-propynyl-pseudouridine, 5-taurinomethyluridine, 1-taurinomethyl-pseudouridine, 5-taurinomethyl-2-thio-uridine, 1-taurinomethyl-4-thio-uridine, 5-methyl-uridine, 1-methyl-pseudouridine, 4-thio-1-methyl-pseudouridine, 2-thio-1-methyl-pseudouridine, 1-methyl-1-deaza-pseudouridine, 2-thio-1-methyl-1-deaza-pseudouridine, dihydrouridine, dihydropseudouridine, 2-thio-dihydrouridine, 2-thio-dihydropseudouridine, 2-methoxyuridine, 2-methoxy-4-thio-uridine, 4-methoxy-pseudouridine, 4-methoxy-2-thio-pseudouridine, 5-aza-cytidine, pseudoisocytidine, 3-methyl-cytidine, N4-acetylcytidine, 5-formylcytidine, N4-methylcytidine, 5-hydroxymethylcytidine, 1-methyl-pseudoisocytidine, pyrrolo-cytidine, pyrrolo-pseudoisocytidine, 2-thio-cytidine, 2-thio-5-methyl-cytidine, 4-thio-pseudoisocytidine, 4-thio-1-methyl-pseudoisocytidine, 4-thio-1-methyl-1-deaza-pseudoisocytidine, 1-methyl-1-deaza-pseudoisocytidine, zebularine, 5-aza-zebularine, 5-methyl-zebularine, 5-aza-2-thio-zebularine, 2-thio-zebularine, 2-methoxy-cytidine, 2-methoxy-5-methyl-cytidine, 4-methoxy-pseudoisocytidine, 4-methoxy-1-methyl-pseudoisocytidine, 2-aminopurine, 2,6-diaminopurine, 7-deaza-adenine, 7-deaza-8-aza-adenine, 7-deaza-2-aminopurine, 7-deaza-8-aza-2-aminopurine, 7-deaza-2,6-diaminopurine, 7-deaza-8-aza-2,6-diaminopurine, 1-methyladenosine, N6-methyladenosine, N6-isopentenyladenosine, N6-(cis-hydroxyisopentenyl)adenosine, 2-methylthio-N6-(cis-hydroxyisopentenyl) adenosine, N6-glycinylcarbamoyladenosine, N6-threonylcarbamoyladenosine, 2-methylthio-N6-threonyl carbamoyladenosine, N6,N6-dimethyladenosine, 7-methyladenine, 2-methylthio-adenine, 2-methoxy-adenine, inosine, 1-methyl-inosine, wyosine, wybutosine, 7-deaza-guanosine, 7-deaza-8-aza-guanosine, 6-thio-guanosine, 6-thio-7-deaza-guanosine, 6-thio-7-deaza-8-aza-guanosine, 7-methyl-guanosine, 6-thio-7-methyl-guanosine, 7-methylinosine, 6-methoxy-guanosine, 1-methylguanosine, N2-methylguanosine, N2,N2-dimethylguanosine, 8-oxo-guanosine, 7-methyl-8-oxo-guanosine, 1-methyl-6-thio-guanosine, N2-methyl-6-thio-guanosine, and N2,N2-dimethyl-6-thio-guanosine.

[0029] Further provided herein are methods for enhancing protein (e.g., an anti-viral polypeptide, e.g., an anti-viral polypeptide described herein) product yield in a cell culture process, comprising the steps of: (a) providing a cell culture comprising a plurality of host cells; (b) contacting the cell culture with a composition comprising a nucleic acid comprising a translatable region encoding an anti-viral polypeptide, e.g., an anti-microbial polypeptide described herein, and at least one nucleoside modification, wherein the nucleic acid exhibits increased protein production efficiency in a cell culture into which the nucleic acid is introduced, relative to a corresponding unmodified nucleic acid. In certain embodiments, methods are provided, wherein the increased protein production efficiency comprises increased cell transfection. In certain embodiments, the increased protein production efficiency comprises increased protein translation from the nucleic acid. In certain embodiments, the increased protein production efficiency comprises decreased nucleic acid degradation. In certain embodiments, the increased protein production efficiency comprises reduced innate immune response of the host cell. In certain embodiments, methods are provided, wherein the cell culture comprises a fed-batch mammalian cell culture process.

[0030] Further provided herein are methods for optimizing expression of an engineered protein (e.g., an anti-viral polypeptide, e.g., an anti-viral polypeptide described herein) in a target cell, comprising the steps of: (a) providing a plurality of target cell types; (b) independently contacting with each of the plurality of target cell types an isolated nucleic acid comprising a translatable region encoding an engineered polypeptide and at least one nucleoside modification; and (c) detecting the presence and/or level of the engineered polypeptide in the plurality of target cell types, thereby optimizing expression of an engineered polypeptide in a target cell. In certain embodiments, the engineered polypeptide comprises a post-translational modification. In certain embodiments, the engineered polypeptide comprises a tertiary structure. In certain embodiments, methods are provided, wherein the target cell comprises a mammalian cell line.

[0031] Further provided herein are methods of antagonizing a biological pathway in a cell, e.g., a biological pathway associated with a viral infection, comprising the step of contacting the cell with an effective amount of a composition comprising a nucleic acid comprising: (i) a translatable region encoding a recombinant polypeptide (e.g., an anti-viral polypeptide, e.g., an anti-viral polypeptide described herein); and (ii) at least one nucleoside modification, under conditions such that the nucleic acid is localized into the cell and the recombinant polypeptide is capable of being translated in the cell from the nucleic acid, wherein the recombinant polypeptide inhibits the activity of a polypeptide functional in the biological pathway. In certain embodiments, methods are provided, wherein the biological pathway is defective in a cell having a viral infection and/or in a disease, disorder or condition (e.g., a disease, disorder, or condition described herein) associated with a viral infection.

[0032] Further provided herein are methods of agonizing a biological pathway in a cell, e.g. a biological pathway associated with a viral infection, comprising the step of contacting the cell with an effective amount of a composition comprising a nucleic acid comprising: (i) a translatable region encoding a recombinant polypeptide (e.g., an anti-viral polypeptide, e.g., an anti-viral polypeptide described herein); and (ii) at least one nucleoside modification, under conditions such that the nucleic acid is localized into the cell and the recombinant polypeptide is capable of being translated in the cell from the nucleic acid, wherein the recombinant polypeptide induces the activity of a polypeptide functional in the biological pathway. In certain embodiments, the agonized biological pathway modulates an anti-viral activity. In certain embodiments, the biological pathway is reversibly agonized.

[0033] Further provided herein are methods for enhancing nucleic acid delivery into a cell population, comprising the steps of: (a) providing a cell culture comprising a plurality of host cells; (b) contacting the cell population with a composition comprising an enhanced nucleic acid comprising a translatable region encoding a polypeptide (e.g., an anti-viral polypeptide, e.g., an anti-viral polypeptide described herein) and at least one nucleoside modification, wherein the enhanced nucleic acid exhibits enhanced retention in the cell population, relative to a corresponding unmodified nucleic acid. In certain embodiments, methods are provided, wherein the retention of the enhanced nucleic acid is at least about 50% greater than the retention of the unmodified nucleic acid. In some embodiments, the retention of the enhanced nucleic acid is at least about 100% greater than the retention of the unmodified nucleic acid. In other embodiments, the retention of the enhanced nucleic acid is at least about 200% greater than the retention of the unmodified nucleic acid. In certain embodiments, methods are provided, wherein the step of contacting the cell with the composition is repeated one or more times.

[0034] Further provided herein are methods of nucleic acid co-delivery into a cell population, comprising the steps of: (a) providing a cell culture comprising a plurality of host cells; (b) contacting the cell population with a composition comprising: (i) a first enhanced nucleic acid comprising a translatable region encoding a polypeptide (e.g., an anti-viral polypeptide, e.g., an anti-viral polypeptide described herein) and at least one nucleoside modification; and (ii) a first unmodified nucleic acid, wherein the composition does not substantially induce an innate immune response of the cell population.

[0035] Further provided herein are methods of nucleic acid delivery into a cell population, comprising the steps of: (a) providing a cell culture comprising a plurality of host cells; (b) contacting the cell population with a first composition comprising: (i) a first enhanced nucleic acid comprising a translatable region encoding a recombinant polypeptide (e.g., an anti-viral polypeptide, e.g., an anti-viral polypeptide described herein) and at least one nucleoside modification; and (ii) a first unmodified nucleic acid, wherein the composition does not substantially induce an innate immune response of the cell population; and (c) contacting the cell population with a second composition comprising a first unmodified nucleic acid.

[0036] Further provided herein are kits comprising a composition (e.g., a pharmaceutical composition) comprising a modified mRNA encoding an anti-viral polypeptide, e.g., an anti-viral polypeptide described herein, in one or more containers, and instructions for use thereof.

[0037] Further provided herein are kits for polypeptide production in a subject (e.g., a mammalian subject) suffering from or at risk of developing a viral infection, comprising a first isolated nucleic acid comprising a translatable region and a nucleic acid modification, wherein the nucleic acid is capable of evading an innate immune response of a cell of the non-human vertebrate animal into which the first isolated nucleic acid is introduced, wherein the translatable region encodes a polypeptide comprising an anti-viral activity (e.g., a anti-viral polypeptide described herein), and packaging and instructions therefore. In some embodiments, the instructions comprise instructions for the repeated administration of the first isolated nucleic acid to a cell or a population of cells. In some embodiments, the therapeutic polypeptide is useful in the treatment of an infection in the mammalian subject by a viral pathogen, e.g., a viral pathogen described herein. In some embodiments, the viral pathogen is selected from the group consisting of human immunodeficiency viruses 1 and 2 (HIV-1 and HIV-2), human T-cell leukemia viruses 1 and 2 (HTLV-1 and HTLV-2), respiratory syncytial virus (RSV), human papilloma virus (HPV), adenovirus, hepatitis B virus (HBV), hepatitis C virus (HCV), Epstein-Barr virus (EBV), varicella zoster virus (VZV), cytomegalovirus (CMV), herpes simplex viruses 1 and 2 (HSV-1 and HSV-2), human herpes virus 8 (HHV-8), Yellow Fever virus, Dengue virus, Japanese Encephalitis, and West Nile viruses. In some embodiments, the kit further comprises a second isolated nucleic acid comprising a translatable region. In some embodiments, the translatable region in the second isolated nucleic acid encodes an anti-viral polypeptide, e.g., an anti-viral polypeptide described herein. In some embodiments, the translatable region of the second isolated nucleic acid encodes the same anti-viral polypeptide as the first isolated nucleic acid. In some embodiments, the translatable region of the second isolated nucleic acid encodes a different anti-viral polypeptide than the first isolated nucleic acid. In some embodiments, the second nucleic acid comprises a nucleic acid modification. In some embodiments, the second nucleic acid does not comprise a nucleic acid modification.

[0038] Further provided herein are dressings (e.g., wound dressings) or bandages (e.g., adhesive bandages) comprising a pharmaceutical formulation comprising a modified mRNA encoding an anti-viral polypeptide, e.g., an anti-viral polypeptide described herein.

### DETAILED DESCRIPTION OF THE INVENTION

[0039] In general, exogenous nucleic acids, particularly viral nucleic acids, introduced into cells induce an innate immune response, resulting in interferon (IFN) production and cell death. However, it is of great interest for therapeutics, diagnostics, reagents and for biological assays to deliver a nucleic acid, e.g., a ribonucleic acid (RNA) inside a cell, either in vivo or ex vivo, such as to cause intracellular translation of the nucleic acid and production of the encoded protein. Of particular importance is the delivery and function of a non-integrative nucleic acid, as nucleic acids characterized by integration into a target cell are generally imprecise in their expression levels, deleteriously transferable to progeny and neighbor cells, and suffer from the substantial risk of mutation. Provided herein in part are nucleic acids encoding useful polypeptides capable of killing or reducing the growth of viruses and/or modulating a cell's function and/or activity, and methods of making and using these nucleic acids and polypeptides. As described herein, these nucleic acids are capable of reducing the innate immune activity of a population of cells into which they are introduced, thus increasing the efficiency of protein production in that cell population. Further, one or more additional advantageous activities and/or properties of the nucleic acids and proteins of the invention are described.

[0040] Provided herein are modified nucleic acids encoding an anti-viral polypeptide, e.g., an anti-viral polypeptide described herein, precursors thereof, or partially or fully processed forms of these precursors. In certain embodiments, the modified nucleic acids comprise mRNA. In particular embodiments, the modified mRNA (mmRNA) is derived from cDNA. In certain embodiments, the mmRNA comprises at least two nucleoside modifications. In certain embodiments, these nucleoside modifications comprise 5-methylcytosine and pseudouridine. In some embodiments, around 25%, around 50%, around 75%, or up to and including 100% of cytosine and uridine nucleotides of the modified nucleic acid are modified nucleotides. In certain embodiments, the mmRNA comprises a 5′ cap structure and a 3′ poly-A tail. In specific embodiments, the 5′ cap structure is a Cap 1 structure. In specific embodiments, the poly-A tail comprises at least 10, 20, 30, 40, 50, 60, 70, 80, 90, 100, 110, 120, 130, 140, 150, 160, 170, 180, 190, or 200 nucleotides.

[0041] Further, provided herein are compositions (e.g., pharmaceutical compositions) comprising the modified nucleic acids described herein. In certain embodiments, the compositions further comprise a pharmaceutically acceptable carrier. In certain embodiments, the carrier is formulated for systemic or local administration. In certain embodiments, the administration is intravenous. In certain embodiments, the administration is oral. In certain embodiments, the administration is topical. In certain embodiments, the administration is by inhalation. In certain embodiments, the administration is rectal. In certain embodiments, the administration is vaginal. In certain embodiments, the compositions comprise naked modified nucleic acids. In other embodiments, the modified nucleic acid is complexed or encapsulated. For example, the modified nucleic acids may be complexed in liposomal form or may be encapsulated in a nanoparticle. In certain embodiments, the modified nucleic acids, the complex or the nanoparticle further comprise one or more targeting moieties. These moieties can be used to target delivery in vivo to certain organs, tissues or cells.

[0042] Provided herein are methods of treating a subject having or being suspected of having a viral infection and/or a disease, disorder, or condition associated with a viral infection, the methods comprising administering to a subject in need of such treatment a composition described herein in an amount sufficient to treat the viral infection and/or the disease, disorder, or condition associated with the viral infection. In specific embodiments, the disease, disorder, or condition is associated with one or more cellular and/or molecular changes affecting, for example, the level, activity, and/or localization of an anti-viral polypeptide, e.g., an anti-viral polypeptide described herein, precursors thereof, or a partially or fully processed form of these precursors. Cellular and/or molecular changes may affect transcription, translation, posttranslational modification, processing, folding, intra- and/or extracellular trafficking, intra- and/or extracellular stability/turnover, and/or signaling of one or more molecules associated with an anti-viral activity. In certain embodiments, activities associated with an anti-viral polypeptide are compromised, e.g. 90%, 80%, 70%, 60%, 50%, 40%, 30%, 20%, 10%, 5% or less of wild-type activity. In certain embodiments, the methods of treating a subject having or being suspected of having a viral infection and/or a disease, disorder, or condition associated with a viral infection comprise administering to the subject in need of such treatment a composition comprising a modified nucleic acid described herein in an amount sufficient to kill or inhibit the growth of viruses and/or to treat the disease, disorder, or condition.

[0043] A major drawback of many current treatments for diseases described herein is the necessity to produce anti-viral agents as polypeptides. Polypeptides are ordinarily expressed in and isolated from mammalian or bacterial cultures. Bacterial cultures and many cancer-derived cell culture systems do not faithfully recapitulate post-translational modifications, e.g., glycosylation and amidation, and protein precursors may not be fully processed. In some instances, the lack of posttranslational modification and processing influences the activity of the final protein product, its localization and/or its target specificity. In other instances, precursors and final cleavage products can have different physiological effects. For production of recombinant proteins, the polypeptide product that is effective for a particular treatment must usually be predetermined because the proteins if administered do not undergo any additional processing. Any modification that is vital for activity must also be present on the recombinant protein because they will not be added by the host when the recombinant proteins are administered. Recombinant protein production and purification is expensive and labor intensive. Protein expression host systems may harbor pathogens (e.g. viruses) that may contaminate the purified product. Proteins and particularly protein modifications are inherently unstable and require specific storage conditions and generally have a short shelf life. To be efficacious, recombinant proteins must be further modified, particularly by pegylation to avoid rapid degradation in vivo. Still, site-specific pegylation remains difficult because it can lead to loss of activity, loss of target specificity and/or protein aggregation. Veronese et al. Bioconjugate Chem. 18:1824-1830 (2007).

[0044] The modified mRNA molecules described herein do not share these problems. In comparison to recombinant proteins, they exhibit increased stability for shipping, handling and storage, are easy to mass produce, and when translated from the modified mRNA, the polypeptide can undergo an array of cell- and/or tissue-specific posttranslational processing, folding and modification.

### Anti-Viral Polypeptide

[0045] Anti-viral polypeptides (AVPs) are small peptides of variable length, sequence and structure with broad spectrum activity against a wide range of viruses. See, e.g., Zaiou, J Mol Med, 2007; 85:317. It has been shown that AVPs have broad-spectrum of rapid onset of killing activities, with potentially low levels of induced resistance and concomitant broad anti-inflammatory effects. In some embodiments, the anti-viral polypeptide is under 10 kDa, e.g., under 8 kDa, 6 kDa, 4 kDa, 2 kDa, or 1 kDa. In some embodiments, the anti-viral polypeptide comprises or consists of from about 6 to about 100 amino acids, e.g., from about 6 to about 75 amino acids, about 6 to about 50 amino acids, about 6 to about 25 amino acids, about 25 to about 100 amino acids, about 50 to about 100 amino acids, or about 75 to about 100 amino acids. In certain embodiments, the anti-viral polypeptide comprises or consists of from about 15 to about 45 amino acids. In some embodiments, the anti-viral polypeptide is substantially cationic. In some embodiments, the anti-viral polypeptide is substantially amphipathic. In certain embodiments, the anti-viral polypeptide is substantially cationic and amphipathic. In some embodiments, the anti-viral polypeptide is cytostatic to a virus. In some embodiments, the anti-viral polypeptide is cytotoxic to a virus. In some embodiments, the anti-viral polypeptide is cytostatic and cytotoxic to a virus. In some embodiments, the anti-viral polypeptide is cytostatic to a bacterium, fungus, protozoan, parasite, prion, or a combination thereof. In some embodiments, the anti-viral polypeptide is cytotoxic to a bacterium, fungus, protozoan, parasite, prion or a combination thereof. In certain embodiments, the anti-viral polypeptide is cytostatic and cytotoxic to a bacterium, fungus, protozoan, parasite, prion, or a combination thereof. In some embodiments, the anti-viral polypeptide is cytotoxic to a tumor or cancer cell (e.g., a human cancer cell). In some embodiments, the anti-viral polypeptide is cytostatic to a tumor or cancer cell (e.g., a human cancer cell). In certain embodiments, the anti-viral polypeptide is cytotoxic and cytostatic to a tumor or cancer cell (e.g., a human cancer cell). In some embodiments, the anti-viral polypeptide is a secreted polypeptide.

[0046] AVPs have been isolated and described from a wide range of animals: microorganisms, invertebrates, plants, amphibians, birds, fish, and mammals (Wang et al., Nucleic Acids Res. 2009; 37 (Database issue): D933-7). For example, anti-microbial (e.g., anti-viral) polypeptides are described in Antimicrobial Peptide Database (http://aps.unmc.edu/AP/main.php; Wang et al., Nucleic Acids Res. 2009; 37 (Database issue): D933-7), CAMP: Collection of Anti-Microbial Peptides (http://www.bicnirrh.res.in/antimicrobial/; Thomas et al., Nucleic Acids Res. 2010; 38 (Database issue): D774-80), U.S. Pat. No. 5,221,732, U.S. Pat. No. 5,447,914, U.S. Pat. No. 5,519,115, U.S. Pat. No. 5,607,914, U.S. Pat. No. 5,714,577, U.S. Pat. No. 5,734,015, U.S. Pat. No. 5,798,336, U.S. Pat. No. 5,821,224, U.S. Pat. No. 5,849,490, U.S. Pat. No. 5,856,127, U.S. Pat. No. 5,905,187, U.S. Pat. No. 5,994,308, U.S. Pat. No. 5,998,374, U.S. Pat. No. 6,107,460, U.S. Pat. No. 6,191,254, U.S. Pat. No. 6,211,148, U.S. Pat. No. 6,300,489, U.S. Pat. No. 6,329,504, U.S. Pat. No. 6,399,370, U.S. Pat. No. 6,476,189, U.S. Pat. No. 6,478,825, U.S. Pat. No. 6,492,328, U.S. Pat. No. 6,514,701, U.S. Pat. No. 6,573,361, U.S. Pat. No. 6,573,361, U.S. Pat. No. 6,576,755, U.S. Pat. No. 6,605,698, U.S. Pat. No. 6,624,140, U.S. Pat. No. 6,638,531, U.S. Pat. No. 6,642,203, U.S. Pat. No. 6,653,280, U.S. Pat. No. 6,696,238, U.S. Pat. No. 6,727,066, U.S. Pat. No. 6,730,659, U.S. Pat. No. 6,743,598, U.S. Pat. No. 6,743,769, U.S. Pat. No. 6,747,007, U.S. Pat. No. 6,790,833, U.S. Pat. No. 6,794,490, U.S. Pat. No. 6,818,407, U.S. Pat. No. 6,835,536, U.S. Pat. No. 6,835,713, U.S. Pat. No. 6,838,435, U.S. Pat. No. 6,872,705, U.S. Pat. No. 6,875,907, U.S. Pat. No. 6,884,776, U.S. Pat. No. 6,887,847, U.S. Pat. No. 6,906,035, U.S. Pat. No. 6,911,524, U.S. Pat. No. 6,936,432, U.S. Pat. No. 7,001,924, U.S. Pat. No. 7,071,293, U.S. Pat. No. 7,078,380, U.S. Pat. No. 7,091,185, U.S. Pat. No. 7,094,759, U.S. Pat. No. 7,166,769, U.S. Pat. No. 7,244,710, U.S. Pat. No. 7,314,858, and U.S. Pat. No. 7,582,301, the contents of which are incorporated by references in their entirety.

[0047] In certain embodiments, the anti-viral polypeptide is selected from the group consisting of anti-viral polypeptides provided in Lengthy Table 1. Shown in Lengthy Table 1, in addition to the name of the anti-viral polypeptide is the definition of the polypeptide and the sequence and SEQ ID NO of the polypeptide.

[0048] Exemplary anti-viral polypeptides can also include, but not limited to hBD-2, LL-37, and RNase-7.

[0049] The human defensin hBD-2 is expressed throughout human epithelia. The sequence of the precursor peptide consists of 41 residues present in the mature peptide as well as a leader sequence of secreted peptide. Disruption of hBD-2 expression, as in cystic fibrosis, might be associated with recurrent infections of skin and other epithelia.

[0050] The anti-microbial peptide, LL-37 is processed from the cathelicidin precursor hCAP18. The inhibition of LL-37 expression by Shigella likely causes about 160 million people develop intestinal infections yearly, resulting in over 1 million deaths. It is a multifunctional effector molecule capable of directly killing pathogens, modulating the immune response, stimulating proliferation, angiogenesis, and cellular migration, inhibiting apoptosis, and is associated with inflammation. It may play a part in epithelial cell proliferation as a part in wound closure and that its reduction in chronic wounds impairs re-epithelialization and may contribute to their failure to heal.

[0051] RNAse-7 is a potent AMP that was identified in the skin, human kidney and urinary tract. The systemic delivery of this mRNAs will likely allow expression of natural for the body antibiotic polypeptides even in tissues which are not supposed to be under microbial attack at normal physiological stage but have that danger under disease conditions.

[0052] In some embodiments, the anti-microbial polypeptide comprises or consists of a defensin. Exemplary defensins include, but not limited to, α-defensins (e.g., neutrophil defensin 1, defensin alpha 1, neutrophil defensin 3, neutrophil defensin 4, defensin 5, defensin 6), β-defensins (e.g., beta-defensin 1, beta-defensin 2, beta-defensin 103, beta-defensin 107, beta-defensin 110, beta-defensin 136), and θ-defensins. In other embodiments, the anti-microbial polypeptide comprises or consists of a cathelicidin (e.g., hCAP18).

[0053] The anti-microbial polypeptides described herein may block cell fusion and/or viral entry by one or more enveloped viruses (e.g., HIV, HCV). For example, the anti-microbial polypeptide can comprise or consist of a synthetic peptide corresponding to a region, e.g., a consecutive sequence of at least about 5, 10, 15, 20, 25, 30, 35, 40, 45, 50, 55, or 60 amino acids of the transmembrane subunit of a viral envelope protein, e.g., HIV-1 gp120 or gp41. The amino acid and nucleotide sequences of HIV-1 gp120 or gp41 are described in, e.g., Kuiken et al., (2008). “HIV Sequence Compendium”, Los Alamos National Laboratory. In some embodiments, the anti-microbial polypeptide has at least about 75%, 80%, 85%, 90%, 95%, 100% sequence homology to the corresponding viral protein sequence. In certain embodiments, the anti-microbial polypeptide comprises or consists of enfuvirtide (FUZEON®): Ac-Tyr-Thr-Ser-Leu-Ile-His-Ser-Leu-Ile-Glu-Glu-Ser-Gln-Asn-Gln-Gln-Glu-Lys-Asn-Glu-Gln-Glu-Leu-Leu-Glu-Leu-Asp-Lys-Trp-Ala-Ser-Leu-Trp-Asn-Trp-Phe-NH₂.

[0054] The anti-microbial polypeptides described herein may block viral particle assembly and formation of one or more infective enveloped viruses (e.g., HIV, HCV). For example, the anti-microbial polypeptide can comprise or consist of a synthetic peptide corresponding to a region, e.g., a consecutive sequence of at least about 5, 10, 15, 20, 25, 30, 35, 40, 45, 50, 55, or 60 amino acids of the capsid subunit of a viral capsid protein, e.g., the HIV capsid protein. The amino acid and nucleotide sequences of the HIV-1 capsid protein are described in, e.g., Kuiken et al., (2008). “HIV Sequence Compendium”, Los Alamos National Laboratory. In some embodiments, the anti-microbial polypeptide has at least about 75%, 80%, 85%, 90%, 95%, 100% sequence homology to the corresponding viral protein sequence. In other embodiments, the anti-microbial polypeptide comprises or consists of a synthetic peptide corresponding to a region, e.g., a consecutive sequence of at least about 5, 10, 15, 20, 25, 30, 35, 40, 45, 50, 55, or 60 amino acids of the binding domain of a capsid binding protein. In some embodiments, the anti-microbial polypeptide has at least about 75%, 80%, 85%, 90%, 95%, 100% sequence homology to the corresponding sequence of the capsid binding protein.

[0055] The anti-microbial polypeptides described herein may block protease dimerization and inhibit cleavage of viral proproteins (e.g., HIV Gag-pol processing) into functional proteins thereby preventing release of one or more enveloped viruses (e.g., HIV, HCV). For example, the anti-microbial polypeptide can comprise or consist of a synthetic peptide corresponding to a region, e.g., a consecutive sequence of at least about 5, 10, 15, 20, 25, 30, 35, 40, 45, 50, 55, or 60 amino acids of a viral protease, e.g., the HIV-1 protease. The amino acid and nucleotide sequences of the HIV-1 protease are described in, e.g., Kuiken et al., (2008). “HIV Sequence Compendium”, Los Alamos National Laboratory. In some embodiments, the anti-microbial polypeptide has at least about 75%, 80%, 85%, 90%, 95%, 100% sequence homology to the corresponding viral protein sequence. In other embodiments, the anti-microbial polypeptide can comprise or consist of a synthetic peptide corresponding to a region, e.g., a consecutive sequence of at least about 5, 10, 15, 20, 25, 30, 35, 40, 45, 50, 55, or 60 amino acids of the binding domain of a protease binding protein. In some embodiments, the anti-microbial polypeptide has at least about 75%, 80%, 85%, 90%, 95%, 100% sequence homology to the corresponding sequence of the protease binding protein.

[0056] The anti-microbial polypeptides described herein can include a polypeptide corresponding to the inhibitory region of the endogenous human protein TRIM5-α or cyclophilin A (peptidylprolyl isomerase A). The sequences of human TRIM5-α and cyclophilin A are described, e.g., in Stremlau et al., Nature. 2004; 427(6977):848-53 and Takahashi et al., Nature 1989; 337 (6206), 473-475, respectively.

[0057] The anti-microbial polypeptides described herein can include an in vitro-evolved polypeptide directed against a viral pathogen, e.g., a polypeptide identified or selected by the method described in Example 5.

### Modified Nucleic Acids.

[0058] This invention provides nucleic acids, including RNAs such as mRNAs that contain one or more modified nucleosides (termed “modified nucleic acids”), which have useful properties including the lack of a substantial induction of the innate immune response of a cell into which the mRNA is introduced. Because these modified nucleic acids enhance the efficiency of protein production, intracellular retention of nucleic acids, and viability of contacted cells, as well as possess reduced immunogenicity, these nucleic acids having these properties are termed “enhanced nucleic acids” herein.

[0059] The term “nucleic acid,” in its broadest sense, includes any compound and/or substance that is or can be incorporated into an oligonucleotide chain. Exemplary nucleic acids for use in accordance with the present invention include, but are not limited to, one or more of DNA, RNA, hybrids thereof, RNAi-inducing agents, RNAi agents, siRNAs, shRNAs, miRNAs, antisense RNAs, ribozymes, catalytic DNA, RNAs that induce triple helix formation, aptamers, vectors, etc., described in detail herein.

[0060] Provided are modified nucleic acids containing a translatable region encoding an anti-viral polypeptide, e.g., an anti-viral polypeptide described herein, and one, two, or more than two different nucleoside modifications. In some embodiments, the modified nucleic acid exhibits reduced degradation in a cell into which the nucleic acid is introduced, relative to a corresponding unmodified nucleic acid. For example, the degradation rate of the nucleic acid is reduced by at least 10%, 20%, 30%, 40%, 50%, 60%, 70%, 80%, or 90%, compared to the degradation rate of the corresponding unmodified nucleic acid. Exemplary nucleic acids include ribonucleic acids (RNAs), deoxyribonucleic acids (DNAs), threose nucleic acids (TNAs), glycol nucleic acids (GNAs), peptide nucleic acids (PNAs), locked nucleic acids (LNAs) or a hybrid thereof. In preferred embodiments, the modified nucleic acid includes messenger RNAs (mRNAs). As described herein, the nucleic acids of the invention do not substantially induce an innate immune response of a cell into which the mRNA is introduced.

[0061] In some embodiments, modified nucleosides include pyridin-4-one ribonucleoside, 5-aza-uridine, 2-thio-5-aza-uridine, 2-thiouridine, 4-thio-pseudouridine, 2-thio-pseudouridine, 5-hydroxyuridine, 3-methyluridine, 5-carboxymethyl-uridine, 1-carboxymethyl-pseudouridine, 5-propynyl-uridine, 1-propynyl-pseudouridine, 5-taurinomethyluridine, 1-taurinomethyl-pseudouridine, 5-taurinomethyl-2-thio-uridine, 1-taurinomethyl-4-thio-uridine, 5-methyl-uridine, 1-methyl-pseudouridine, 4-thio-1-methyl-pseudouridine, 2-thio-1-methyl-pseudouridine, 1-methyl-1-deaza-pseudouridine, 2-thio-1-methyl-1-deaza-pseudouridine, dihydrouridine, dihydropseudouridine, 2-thio-dihydrouridine, 2-thio-dihydropseudouridine, 2-methoxyuridine, 2-methoxy-4-thio-uridine, 4-methoxy-pseudouridine, and 4-methoxy-2-thio-pseudouridine.

[0062] In some embodiments, modified nucleosides include 5-aza-cytidine, pseudoisocytidine, 3-methyl-cytidine, N4-acetylcytidine, 5-formylcytidine, N4-methylcytidine, 5-hydroxymethylcytidine, 1-methyl-pseudoisocytidine, pyrrolo-cytidine, pyrrolo-pseudoisocytidine, 2-thio-cytidine, 2-thio-5-methyl-cytidine, 4-thio-pseudoisocytidine, 4-thio-1-methyl-pseudoisocytidine, 4-thio-1-methyl-1-deaza-pseudoisocytidine, 1-methyl-1-deaza-pseudoisocytidine, zebularine, 5-aza-zebularine, 5-methyl-zebularine, 5-aza-2-thio-zebularine, 2-thio-zebularine, 2-methoxy-cytidine, 2-methoxy-5-methyl-cytidine, 4-methoxy-pseudoisocytidine, and 4-methoxy-1-methyl-pseudoisocytidine.

[0063] In other embodiments, modified nucleosides include 2-aminopurine, 2,6-diaminopurine, 7-deaza-adenine, 7-deaza-8-aza-adenine, 7-deaza-2-aminopurine, 7-deaza-8-aza-2-aminopurine, 7-deaza-2,6-diaminopurine, 7-deaza-8-aza-2,6-diaminopurine, 1-methyladenosine, N6-methyladenosine, N6-isopentenyladenosine, N6-(cis-hydroxyisopentenyl)adenosine, 2-methylthio-N6-(cis-hydroxyisopentenyl) adenosine, N6-glycinylcarbamoyladenosine, N6-threonylcarbamoyladenosine, 2-methylthio-N6-threonyl carbamoyladenosine, N6,N6-dimethyladenosine, 7-methyladenine, 2-methylthio-adenine, and 2-methoxy-adenine.

[0064] In certain embodiments it is desirable to intracellularly degrade a modified nucleic acid introduced into the cell, for example if precise timing of protein production is desired. Thus, the invention provides a modified nucleic acid containing a degradation domain, which is capable of being acted on in a directed manner within a cell.

[0065] In other embodiments, modified nucleosides include inosine, 1-methyl-inosine, wyosine, wybutosine, 7-deaza-guanosine, 7-deaza-8-aza-guanosine, 6-thio-guanosine, 6-thio-7-deaza-guanosine, 6-thio-7-deaza-8-aza-guanosine, 7-methyl-guanosine, 6-thio-7-methyl-guanosine, 7-methylinosine, 6-methoxy-guanosine, 1-methylguanosine, N2-methylguanosine, N2,N2-dimethylguanosine, 8-oxo-guanosine, 7-methyl-8-oxo-guanosine, 1-methyl-6-thio-guanosine, N2-methyl-6-thio-guanosine, and N2,N2-dimethyl-6-thio-guanosine.

[0066] Other components of nucleic acid are optional, and are beneficial in some embodiments. For example, a 5′ untranslated region (UTR) and/or a 3′UTR are provided, wherein either or both may independently contain one or more different nucleoside modifications. In such embodiments, nucleoside modifications may also be present in the translatable region. Also provided are nucleic acids containing a Kozak sequence.

[0067] Additionally, nucleic acids encoding anti-viral polypeptides, e.g., anti-viral polypeptides described herein, and containing one or more intronic nucleotide sequences capable of being excised from the nucleic acid are provided herein.

[0068] Further, nucleic acids encoding anti-viral polypeptides, e.g., anti-viral polypeptides described herein, and containing an internal ribosome entry site (IRES) are provided herein. An IRES may act as the sole ribosome binding site, or may serve as one of multiple ribosome binding sites of an mRNA. An mRNA containing more than one functional ribosome binding site may encode several peptides or polypeptides that are translated independently by the ribosomes (“multicistronic mRNA”). When nucleic acids are provided with an IRES, further optionally provided is a second translatable region. Examples of IRES sequences that can be used according to the invention include without limitation, those from picornaviruses (e.g. FMDV), pest viruses (CFFV), polio viruses (PV), encephalomyocarditis viruses (ECMV), foot-and-mouth disease viruses (FMDV), hepatitis C viruses (HCV), classical swine fever viruses (CSFV), murine leukemia virus (MLV), simian immune deficiency viruses (SIV) or cricket paralysis viruses (CrPV).

### Prevention or Reduction of Innate Cellular Immune Response Activation Using Modified Nucleic Acids.

[0069] The term “innate immune response” includes a cellular response to exogenous single stranded nucleic acids, generally of viral or bacterial origin, which involves the induction of cytokine expression and release, particularly the interferons, and cell death. Protein synthesis is also reduced during the innate cellular immune response. While it is advantageous to eliminate the innate immune response in a cell, the invention provides modified mRNAs that substantially reduce the immune response, including interferon signaling, without entirely eliminating such a response. In some embodiments, the immune response is reduced by 10%, 20%, 30%, 40%, 50%, 60%, 70%, 80%, 90%, 95%, 99%, 99.9%, or greater than 99.9% as compared to the immune response induced by a corresponding unmodified nucleic acid. Such a reduction can be measured by expression or activity level of Type 1 interferons or the expression of interferon-regulated genes such as the toll-like receptors (e.g., TLR7 and TLR8). Reduction of innate immune response can also be measured by decreased cell death following one or more administrations of modified RNAs to a cell population; e.g., cell death is 10%, 25%, 50%, 75%, 85%, 90%, 95%, or over 95% less than the cell death frequency observed with a corresponding unmodified nucleic acid. Moreover, cell death may affect fewer than 50%, 40%, 30%, 20%, 10%, 5%, 1%, 0.1%, 0.01% or fewer than 0.01% of cells contacted with the modified nucleic acids.

[0070] The invention provides for the repeated introduction (e.g., transfection) of modified nucleic acids into a target cell population, e.g., in vitro, ex vivo, or in vivo. The step of contacting the cell population may be repeated one or more times (such as two, three, four, five or more than five times). In some embodiments, the step of contacting the cell population with the modified nucleic acids is repeated a number of times sufficient such that a predetermined efficiency of protein translation in the cell population is achieved. Given the reduced cytotoxicity of the target cell population provided by the nucleic acid modifications, such repeated transfections are achievable in a diverse array of cell types.

### Polypeptide Variants.

[0071] Provided are nucleic acids that encode variant polypeptides, which have a certain identity with a reference polypeptide (e.g., an anti-viral polypeptide, e.g., an anti-viral polypeptide described herein) sequence. The term “identity” as known in the art, refers to a relationship between the sequences of two or more peptides, as determined by comparing the sequences. In the art, “identity” also means the degree of sequence relatedness between peptides, as determined by the number of matches between strings of two or more amino acid residues. “Identity” measures the percent of identical matches between the smaller of two or more sequences with gap alignments (if any) addressed by a particular mathematical model or computer program (i.e., “algorithms”). Identity of related peptides can be readily calculated by known methods. Such methods include, but are not limited to, those described in Computational Molecular Biology, Lesk, A. M., ed., Oxford University Press, New York, 1988; Biocomputing: Informatics and Genome Projects, Smith, D. W., ed., Academic Press, New York, 1993; Computer Analysis of Sequence Data, Part 1, Griffin, A. M., and Griffin, H. G., eds., Humana Press, New Jersey, 1994; Sequence Analysis in Molecular Biology, von Heinje, G., Academic Press, 1987; Sequence Analysis Primer, Gribskov, M. and Devereux, J., eds., M. Stockton Press, New York, 1991; and Carillo et al., SIAM J. Applied Math. 48, 1073 (1988).

[0072] In some embodiments, the polypeptide variant has the same or a similar activity as the reference polypeptide. Alternatively, the variant has an altered activity (e.g., increased or decreased) relative to a reference polypeptide. Generally, variants of a particular polynucleotide or polypeptide of the invention will have at least about 40%, 45%, 50%, 55%, 60%, 65%, 70%, 75%, 80%, 85%, 90%, 91%, 92%, 93%, 94%, 95%, 96%, 97%, 98%, 99% or more sequence identity to that particular reference polynucleotide or polypeptide as determined by sequence alignment programs and parameters described herein and known to those skilled in the art.

[0073] As recognized by those skilled in the art, protein fragments, functional protein domains, and homologous proteins are also considered to be within the scope of this invention. For example, provided herein is any protein fragment of a reference protein (meaning a polypeptide sequence at least one amino acid residue shorter than a reference polypeptide sequence but otherwise identical) 5, 10, 15, 20, 25, 30, 35, 40, 45, 50, 55, 60, 70, 80, 90, 100 or greater than 100 amino acids in length. In another example, any protein that includes a stretch of about 20, about 30, about 40, about 50, or about 100 amino acids which are about 40%, about 50%, about 60%, about 70%, about 80%, about 90%, about 95%, about 98%, or about 100% identical to any of the sequences described herein can be utilized in accordance with the invention. In certain embodiments, a protein sequence to be utilized in accordance with the invention includes 2, 3, 4, 5, 6, 7, 8, 9, 10, or more mutations as shown in any of the sequences provided or referenced herein.

### Polynucleotide Libraries.

[0074] Also provided are polynucleotide libraries containing nucleoside modifications, wherein the polynucleotides individually contain a first nucleic acid sequence encoding a polypeptide, such as an anti-viral polypeptide, e.g., an anti-viral polypeptide described herein. Preferably, the polynucleotides are mRNA in a form suitable for direct introduction into a target cell host, which in turn synthesizes the encoded polypeptide.

[0075] In certain embodiments, multiple variants of a protein, each with different amino acid modification(s), are produced and tested to determine the best variant in terms of pharmacokinetics, stability, biocompatibility, and/or biological activity, or a biophysical property such as expression level. Such a library may contain 10, 10², 10³, 10⁴, 10⁵, 10⁶, 10⁷, 10⁸, 10⁹, or over 10⁹ possible variants (including substitutions, deletions of one or more residues, and insertion of one or more residues).

### Polypeptide-Nucleic Acid Complexes.

[0076] Proper protein translation involves the physical aggregation of a number of polypeptides and nucleic acids associated with the mRNA. Provided by the invention are complexes containing conjugates of protein and nucleic acids, containing a translatable mRNA encoding an anti-viral polypeptide, e.g., an anti-viral polypeptide described herein, and having one or more nucleoside modifications (e.g., at least two different nucleoside modifications) and one or more polypeptides bound to the mRNA. Generally, the proteins are provided in an amount effective to prevent or reduce an innate immune response of a cell into which the complex is introduced.

### Targeting Moieties.

[0077] In embodiments of the invention, modified nucleic acids are provided to express a protein-binding partner or a receptor on the surface of the cell, which functions to target the cell to a specific tissue space or to interact with a specific moiety, either in vivo or in vitro. Suitable protein-binding partners include antibodies and functional fragments thereof, scaffold proteins, or peptides. Additionally, modified nucleic acids can be employed to direct the synthesis and extracellular localization of lipids, carbohydrates, or other biological moieties.

### Untranslatable Modified Nucleic Acids; Vaccines.

[0078] As described herein, provided are mRNAs having sequences that are substantially not translatable. Such mRNA is effective as a vaccine when administered to a mammalian subject.

[0079] Also provided are modified nucleic acids that contain one or more noncoding regions. Such modified nucleic acids are generally not translated, but are capable of binding to and sequestering one or more translational machinery component such as a ribosomal protein or a transfer RNA (tRNA), thereby effectively reducing protein expression in the cell. The modified nucleic acid may contain a small nucleolar RNA (sno-RNA), micro RNA (miRNA), small interfering RNA (siRNA), or Piwi-interacting RNA (piRNA).

[0080] Additionally, certain modified nucleosides, or combinations thereof, when introduced into modified nucleic acids activate the innate immune response. Such activating modified nucleic acids, e.g., modified RNAs, are useful as adjuvants when combined with polypeptides (e.g., anti-viral polypeptides) or other vaccines. In certain embodiments, the activated modified mRNAs contain a translatable region which encodes for a polypeptide (e.g., an anti-viral polypeptide (e.g., an anti-viral polypeptide described herein)) sequence useful as a vaccine, thus providing the ability to be a self-adjuvant.

### Modified Nucleic Acid Synthesis.

[0081] Nucleic acids for use in accordance with the invention may be prepared according to any available technique including, but not limited to chemical synthesis, enzymatic synthesis, which is generally termed in vitro transcription, enzymatic or chemical cleavage of a longer precursor, etc. Methods of synthesizing RNAs are known in the art (see, e.g., Gait, M. J. (ed.) Oligonucleotide synthesis: a practical approach, Oxford (Oxfordshire), Washington, D.C.: IRL Press, 1984; and Herdewijn, P. (ed.) Oligonucleotide synthesis: methods and applications, Methods in Molecular Biology, v. 288 (Clifton, N.J.) Totowa, N.J.: Humana Press, 2005; both of which are incorporated herein by reference).

[0082] Modified nucleic acids need not be uniformly modified along the entire length of the molecule. Different nucleotide modifications and/or backbone structures may exist at various positions in the nucleic acid. One of ordinary skill in the art will appreciate that the nucleotide analogs or other modification(s) may be located at any position(s) of a nucleic acid such that the function of the nucleic acid is not substantially decreased. A modification may also be a 5′ or 3′ terminal modification. The nucleic acids may contain at a minimum one and at maximum 100% modified nucleotides, or any intervening percentage, such as at least 50% modified nucleotides, at least 80% modified nucleotides, or at least 90% modified nucleotides.

[0083] Generally, the length of a modified mRNA of the present invention is greater than 30 nucleotides in length. In another embodiment, the RNA molecule is greater than 35, 40, 45, 50, 60, 75, 100, 125, 150, 175, 200, 250, 300, 350, 400, 450, 500, 600, 700, 800, 900, 1000, 1100, 1200, 1300, 1400, 1500, 1800, 2000, 3000, 4000, or 5000 nucleotides, or greater than 5000 nucleotides.

### Uses of Modified Nucleic Acids.

### Therapeutic Agents.

[0084] The modified nucleic acids described herein can be used as therapeutic agents to treat or prevent viral infections and/or diseases, disorders, or conditions associated with viral infections. Provided herein are compositions (e.g., pharmaceutical compositions), formulations, methods, kits, dressings (e.g., wound dressings), bandages (adhesive bandages), and reagents for treatment or prevention of diseases, disorders, or conditions, e.g., diseases, disorders, or conditions associated with viral infections, in humans and other animals (e.g., mammals). The active therapeutic agents of the invention include modified nucleic acids, cells containing modified nucleic acids or polypeptides translated from the modified nucleic acids, polypeptides translated from modified nucleic acids, and cells contacted with cells containing modified nucleic acids or polypeptides translated from the modified nucleic acids.

[0085] Provided are methods of inducing translation of a recombinant polypeptide (e.g., an anti-viral polypeptide described herein) in a cell population using the modified nucleic acids described herein. Such translation can be in vivo, ex vivo, in culture, or in vitro. The cell population is contacted with an effective amount of a composition containing a nucleic acid that has at least one nucleoside modification, and a translatable region encoding the recombinant polypeptide. The population is contacted under conditions such that the nucleic acid is localized into one or more cells of the cell population and the recombinant polypeptide is translated in the cell from the nucleic acid.

[0086] An effective amount of the composition is provided based, at least in part, on the target tissue, target cell type, means of administration, physical characteristics of the nucleic acid (e.g., size, and extent of modified nucleosides), and other determinants. In general, an effective amount of the composition provides efficient protein production in the cell, preferably more efficient than a composition containing a corresponding unmodified nucleic acid. Increased efficiency may be demonstrated by increased cell transfection (i.e., the percentage of cells transfected with the nucleic acid), increased protein translation from the nucleic acid, decreased nucleic acid degradation (as demonstrated, e.g., by increased duration of protein translation from a modified nucleic acid), or reduced innate immune response of the host cell.

[0087] Aspects of the disclosures are directed to methods of inducing in vivo translation of a recombinant polypeptide (e.g., an anti-viral polypeptide described herein) in a human or animal (e.g., mammalian) subject in need thereof. Therein, an effective amount of a composition containing a nucleic acid that has at least one nucleoside modification and a translatable region encoding the recombinant polypeptide (e.g., an anti-viral polypeptide described herein) is administered to the subject using the delivery methods described herein. The nucleic acid is provided in an amount and under other conditions such that the nucleic acid is localized into a cell of the subject and the recombinant polypeptide is translated in the cell from the nucleic acid. The cell in which the nucleic acid is localized, or the tissue in which the cell is present, may be targeted with one or more than one rounds of nucleic acid administration.

[0088] Other aspects of the disclosures relate to transplantation of cells containing modified nucleic acids to a human or animal (e.g., mammalian) subject. Administration of cells to human or animal (e.g., mammalian) subjects is known to those of ordinary skill in the art, such as local implantation (e.g., topical or subcutaneous administration), organ delivery or systemic injection (e.g., intravenous injection or inhalation), as is the formulation of cells in pharmaceutically acceptable carrier. Compositions containing modified nucleic acids are formulated for administration intramuscularly, transarterially, intraocularly, vaginally, rectally, intraperitoneally, intravenously, intranasally, subcutaneously, endoscopically, transdermally, or intrathecally. In some embodiments, the composition is formulated for extended release.

[0089] The subject to whom the therapeutic agent is administered suffers from or is at risk of developing a disease, disorder, or deleterious condition. Provided are methods of identifying, diagnosing, and classifying subjects on these bases, which may include clinical diagnosis, biomarker levels, genome-wide association studies (GWAS), and other methods known in the art.

[0090] In certain embodiments, nucleic acids encoding an anti-viral polypeptide, e.g., an anti-viral polypeptide described herein, are administered to subjects in need of anti-viral polypeptide administration.

[0091] In certain embodiments, the administered modified nucleic acid directs production of one or more recombinant polypeptides that provide a functional activity which is substantially absent in the cell in which the recombinant polypeptide is translated. For example, the missing functional activity may be enzymatic, structural, or gene regulatory in nature. In related embodiments, the administered modified nucleic acid directs production of one or more recombinant polypeptides that increases (e.g., synergistically) a functional activity which is present but substantially deficient in the cell in which the recombinant polypeptide is translated.

[0092] In other embodiments, the administered modified nucleic acid directs production of one or more recombinant polypeptides that replace a polypeptide (or multiple polypeptides) that is substantially absent in the cell in which the recombinant polypeptide is translated. Such absence may be due to genetic mutation of the encoding gene or regulatory pathway thereof. In some embodiments, the recombinant polypeptide increases the level of an endogenous protein in the cell to a desirable level; such an increase may bring the level of the endogenous protein from a subnormal level to a normal level, or from a normal level to a super-normal level.

[0093] Alternatively, the recombinant polypeptide functions to antagonize the activity of an endogenous protein present in, on the surface of, or secreted from the cell. Usually, the activity of the endogenous protein is deleterious to the subject, for example, due to mutation of the endogenous protein resulting in altered activity or localization. Additionally, the recombinant polypeptide antagonizes, directly or indirectly, the activity of a biological moiety present in, on the surface of, or secreted from the cell. Examples of antagonized biological moieties include lipids (e.g., cholesterol), a lipoprotein (e.g., low density lipoprotein), a nucleic acid, a carbohydrate, a protein toxin such as shiga and tetanus toxins, or a small molecule toxin such as botulinum, cholera, and diphtheria toxins. Additionally, the antagonized biological molecule may be an endogenous protein that exhibits an undesirable activity, such as a cytotoxic or cytostatic activity.

[0094] The recombinant proteins described herein are engineered for localization within the cell, potentially within a specific compartment such as the nucleus, or are engineered for secretion from the cell or translocation to the plasma membrane of the cell.

[0095] As described herein, a useful feature of the modified nucleic acids of the invention is the capacity to reduce the innate immune response of a cell to an exogenous nucleic acid. Provided are methods for performing the titration, reduction or elimination of the immune response in a cell or a population of cells. In some embodiments, the cell is contacted with a first composition that contains a first dose of a first exogenous nucleic acid including a translatable region and at least one nucleoside modification, and the level of the innate immune response of the cell to the first exogenous nucleic acid is determined. Subsequently, the cell is contacted with a second composition, which includes a second dose of the first exogenous nucleic acid, the second dose containing a lesser amount of the first exogenous nucleic acid as compared to the first dose. Alternatively, the cell is contacted with a first dose of a second exogenous nucleic acid. The second exogenous nucleic acid may contain one or more modified nucleosides, which may be the same or different from the first exogenous nucleic acid or, alternatively, the second exogenous nucleic acid may not contain modified nucleosides. The steps of contacting the cell with the first composition and/or the second composition may be repeated one or more times. Additionally, efficiency of protein production (e.g., protein translation) in the cell is optionally determined, and the cell may be re-transfected with the first and/or second composition repeatedly until a target protein production efficiency is achieved.

### Topical Delivery Applied to the Skin.

[0096] The skin is a desirable target site for nucleic acid delivery. It is readily accessible, and gene expression may be restricted not only to the skin, potentially avoiding nonspecific toxicity, but also to specific layers and cell types within the skin. The site of cutaneous expression of the delivered nucleic acid will depend on the route of nucleic acid delivery. Three routes are commonly considered to deliver nucleic acids to the skin: (i) topical application (e.g. for local/regional treatment); (ii) intradermal injection (e.g. for local/regional treatment); and (iii) systemic delivery (e.g., for treatment of dermatologic diseases that affect both cutaneous and extracutaneous regions). Nucleic acids can be delivered to the skin by several different approaches. Most have been shown to work for DNA, such as, topical application of non-cationic liposome-DNA complex, cationic liposome-DNA complex, particle-mediated (gene gun), puncture-mediated gene transfections, and viral delivery approaches. After gene delivery, gene products have been detected in a number of skin cell types, including but not limited to basal keratinocytes, sebaceous gland cells, dermal fibroblasts and dermal macrophages.

[0097] In certain embodiments, dressing formulations comprising a modified nucleic acid encoding for an anti-viral polypeptide, e.g., an anti-viral polypeptide described herein, precursor or a partially or fully processed form are provided herein.

[0098] In certain embodiments, the composition described herein is formulated for administration via a bandage (e.g., adhesive bandage).

[0099] The modified nucleic acids encoding for an anti-viral polypeptide, e.g., an anti-viral polypeptide described herein, precursor or a partially or fully processed form described herein may be intermixed with the dressing formulations or may be applied separately, e.g. by soaking or spraying.

### Targeting Moieties.

[0100] In embodiments of the invention, modified nucleic acids are provided to express a protein-binding partner or a receptor on the surface of the cell, which functions to target the cell to a specific tissue space or to interact with a specific moiety, either in vivo or in vitro. Suitable protein-binding partners include antibodies and functional fragments thereof, scaffold proteins, or peptides. Additionally, modified nucleic acids can be employed to direct the synthesis and extracellular localization of lipids, carbohydrates, or other biological moieties.

### Methods of Treating Diseases and Conditions.

[0101] Provided are methods for treating or preventing a viral infection and/or a disease, disorder, or condition associated with a viral infection, and/or a symptom thereof, by providing an anti-viral activity. Because of the rapid initiation of protein production following introduction of modified mRNAs, as compared to viral DNA vectors, the compounds of the present invention are particularly advantageous in treating acute or chronic diseases such as microbial infections and sepsis. Moreover, the lack of transcriptional regulation of the modified mRNAs of the invention is advantageous in that accurate titration of protein production is achievable. In some embodiments, modified mRNAs and their encoded polypeptides in accordance with the present invention may be used for therapeutic purposes.

[0102] In some embodiments, modified mRNAs and their encoded polypeptides in accordance with the present invention may be used for treatment of viral infections and/or any of a variety of diseases, disorders, and/or conditions associated with viral infections.

[0103] In one embodiment, modified mRNAs and their encoded polypeptides in accordance with the present disclosure may be useful in the treatment of inflammatory disorders coincident with or resulting from infection.

[0104] Exemplary diseases, disorders, or conditions associated with viral infections include, but not limited to, acute febrile pharyngitis, pharyngoconjunctival fever, epidemic keratoconjunctivitis, infantile gastroenteritis, Coxsackie infections, infectious mononucleosis, Burkitt lymphoma, acute hepatitis, chronic hepatitis, hepatic cirrhosis, hepatocellular carcinoma, primary HSV-1 infection (e.g., gingivostomatitis in children, tonsillitis and pharyngitis in adults, keratoconjunctivitis), latent HSV-1 infection (e.g., herpes labialis and cold sores), primary HSV-2 infection, latent HSV-2 infection, aseptic meningitis, infectious mononucleosis, Cytomegalic inclusion disease, Kaposi sarcoma, multicentric Castleman disease, primary effusion lymphoma, AIDS, influenza, Reye syndrome, measles, postinfectious encephalomyelitis, Mumps, hyperplastic epithelial lesions (e.g., common, flat, plantar and anogenital warts, laryngeal papillomas, epidermodysplasia verruciformis), cervical carcinoma, squamous cell carcinomas, croup, pneumonia, bronchiolitis, common cold, Poliomyelitis, Rabies, bronchiolitis, pneumonia, influenza-like syndrome, severe bronchiolitis with pneumonia, German measles, congenital rubella, Varicella, and herpes zoster.

[0105] Exemplary viral pathogens include, but not limited to, adenovirus, coxsackievirus, dengue virus, encephalitis virus, Epstein-Barr virus, hepatitis A virus, hepatitis B virus, hepatitis C virus, herpes simplex virus type 1, herpes simplex virus type 2, cytomegalovirus, human herpesvirus type 8, human immunodeficiency virus, influenza virus, measles virus, mumps virus, human papillomavirus, parainfluenza virus, poliovirus, rabies virus, respiratory syncytial virus, rubella virus, varicella-zoster virus, West Nile virus, and yellow fever virus. Viral pathogens may also include viruses that cause resistant viral infections.

[0106] Provided herein, are methods to prevent infection and/or sepsis in a subject at risk of developing infection and/or sepsis, the method comprising administering to a subject in need of such prevention a composition comprising a modified nucleic acid precursor encoding an anti-viral polypeptide, e.g., an anti-viral polypeptide described herein, or a partially or fully processed form thereof in an amount sufficient to prevent infection and/or sepsis. In certain embodiments, the subject at risk of developing infection and/or sepsis is a cancer patient. In certain embodiments, the cancer patient has undergone a conditioning regimen. In some embodiments, the conditioning regiment comprises chemotherapy, irradiation or both.

[0107] As a non-limiting example, sepsis may be treated using the modified mRNAs described herein encoding Protein C, its zymogen or prepro-protein, the active form of Protein C (APC), variants of Protein C which are known in the art, or the Protein C like molecules, variants and derivatives taught in U.S. Pat. Nos. 7,226,999, 7,498,305, 6,630,138; each of which is incorporated herein by reference in its entirety.

[0108] In one embodiment, the modified mRNAs of the present invention may be administered in conjunction with one or more antibiotics. These include, but are not limited to Aknilox, Ambisome, Amoxycillin, Ampicillin, Augmentin, Avelox, Azithromycin, Bactroban, Betadine, Betnovate, Blephamide, Cefaclor, Cefadroxil, Cefdinir, Cefepime, Cefix, Cefixime, Cefoxitin, Cefpodoxime, Cefprozil, Cefuroxime, Cefzil, Cephalexin, Cephazolin, Ceptaz, Chloramphenicol, Chlorhexidine, Chloromycetin, Chlorsig, Ciprofloxacin, Clarithromycin, Clindagel, Clindamycin, Clindatech, Cloxacillin, Colistin, Co-trimoxazole, Demeclocycline, Diclocil, Dicloxacillin, Doxycycline, Duricef, Erythromycin, Flamazine, Floxin, Framycetin, Fucidin, Furadantin, Fusidic, Gatifloxacin, Gemifloxacin, Gemifloxacin, Ilosone, Iodine, Levaquin, Levofloxacin, Lomefloxacin, Maxaquin, Mefoxin, Meronem, Minocycline, Moxifloxacin, Myambutol, Mycostatin, Neosporin, Netromycin, Nitrofurantoin, Norfloxacin, Norilet, Ofloxacin, Omnicef, Ospamox, Oxytetracycline, Paraxin, Penicillin, Pneumovax, Polyfax, Povidone, Rifadin, Rifampin, Rifaximin, Rifinah, Rimactane, Rocephin, Roxithromycin, Seromycin, Soframycin, Sparfloxacin, Staphlex, Targocid, Tetracycline, Tetradox, Tetralysal, tobramycin, Tobramycin, Trecator, Tygacil, Vancocin, Velosef, Vibramycin, Xifaxan, Zagam, Zitrotek, Zoderm, Zymar, and Zyvox.

[0109] Further provided herein, are methods to treat infection and/or sepsis in a subject, the method comprising administering to a subject in need of such treatment a composition comprising a modified nucleic acid precursor encoding an anti-viral polypeptide, e.g., an anti-viral polypeptide described herein, or a partially or fully processed form thereof in an amount sufficient to treat an infection and/or sepsis. In certain embodiments, the subject in need of treatment is a cancer patient. In certain embodiments, the cancer patient has undergone a conditioning regimen. In some embodiments, the conditioning regiment comprises chemotherapy, irradiation or both.

[0110] In certain embodiments, the subject exhibits active or chronic viral infections. In certain embodiments, the subject has received or is receiving a therapy. In certain embodiments, the therapy is radiotherapy, chemotherapy, steroids, or ultraviolet radiation. In certain embodiments, the patient suffers from a microvascular disorder. In some embodiments, the microvascular disorder is diabetes. In some embodiments, the wound is an ulcer. In a specific embodiment, the wound is a diabetic foot ulcer. In certain embodiments, the subject has one or more burn wounds. In certain embodiments, the administration is local or systemic. In certain embodiments, the administration is subcutaneous. In certain embodiments, the administration is intravenous. In certain embodiments, the administration is oral. In certain embodiments, the administration is topical. In certain embodiments, the administration is by inhalation. In certain embodiments, the administration is rectal. In certain embodiments, the administration is vaginal.

### Combination Therapy

[0111] Provided are methods for treating or preventing a viral infection and/or a disease, disorder, or condition associated with a viral infection, or a symptom thereof, in a subject, by administering a modified nucleic acid encoding an anti-viral polypeptide, e.g., an anti-viral polypeptide described herein in combination with an anti-viral agent, e.g., an anti-viral polypeptide or a small molecule anti-viral agent described herein.

[0112] The agents can be administered simultaneously, for example in a combined unit dose (e.g., providing simultaneous delivery of both agents). Alternatively, the agents can be administered at a specified time interval, for example, an interval of minutes, hours, days or weeks. Generally, the agents are concurrently bioavailable, e.g., detectable, in the subject. In some embodiments, the agents are administered essentially simultaneously, for example two unit dosages administered at the same time, or a combined unit dosage of the two agents. In other embodiments, the agents are delivered in separate unit dosages. The agents can be administered in any order, or as one or more preparations that includes two or more agents. In a preferred embodiment, at least one administration of one of the agents, e.g., the first agent, is made within minutes, one, two, three, or four hours, or even within one or two days of the other agent, e.g., the second agent. In some embodiments, combinations can achieve synergistic results, e.g., greater than additive results, e.g., at least 25, 50, 75, 100, 200, 300, 400, or 500% greater than additive results.

[0113] Exemplary anti-viral agents include, but not limited to, abacavir (ZIAGEN®), abacavir/lamivudine/zidovudine (Trizivir®), aciclovir or acyclovir (CYCLOVIR®, HERPEX®, ACIVIR®, ACIVIRAX®, ZOVIRAX®, ZOVIR®), adefovir (Preveon®, Hepsera®), amantadine (SYMMETREL®), amprenavir (AGENERASE®), ampligen, arbidol, atazanavir (REYATAZ®), boceprevir, cidofovir, darunavir (PREZISTA®), delavirdine (RESCRIPTOR®), didanosine (VIDEX®), docosanol (ABREVA®), edoxudine, efavirenz (SUSTIVA®, STOCRIN®), emtricitabine (EMTRIVA®), emtricitabine/tenofovir/efavirenz (ATRIPLA®), enfuvirtide (FUZEON®), entecavir (BARACLUDE®, ENTAVIR®), famciclovir (FAMVIR®), fomivirsen (VITRAVENE®), fosamprenavir (LEXIVA®, TELZIR®), foscarnet (FOSCAVIR®), fosfonet, ganciclovir (CYTOVENE®, CYMEVENE®, VITRASERT®), GS 9137 (ELVITEGRAVIR®), imiquimod (ALDARA®, ZYCLARA®, BESELNA®), indinavir (CRIXIVAN®), inosine, inosine pranobex (IMUNOVIR®), interferon type I, interferon type II, interferon type III, kutapressin (NEXAVIR®), lamivudine (ZEFFIX®, HEPTOVIR®, EPIVIR®), lamivudine/zidovudine (COMBIVIR®), lopinavir, loviride, maraviroc (SELZENTRY®, CELSENTRI®), methisazone, MK-2048, moroxydine, nelfinavir (VIRACEPT®), nevirapine (VIRAMUNE®), oseltamivir (TAMIFLU®), peginterferon alfa-2a (PEGASYS®), penciclovir (DENAVIR®), peramivir, pleconaril, podophyllotoxin (CONDYLOX®), raltegravir (ISENTRESS®), ribavirin (COPEGUs®, REBETOL®, RIBASPHERE®, VILONA® AND VIRAZOLE®), rimantadine (FLUMADINE®), ritonavir (NORVIR®), pyramidine, saquinavir (INVIRASE®, FORTOVASE®), stavudine, tea tree oil (melaleuca oil), tenofovir (VIREAD®), tenofovir/emtricitabine (TRUVADA®), tipranavir (APTIVUS®), trifluridine (VIROPTIC®), tromantadine (VIRU-MERZ®), valaciclovir (VALTREX®), valganciclovir (VALCYTE®), vicriviroc, vidarabine, viramidine, zalcitabine, zanamivir (RELENZA®), and zidovudine (azidothymidine (AZT), RETROVIR®, RETROVIS®).

### Targeting of Pathogenic Organisms; Purification of Biological Materials.

[0114] Provided herein are methods for targeting viruses, using modified mRNAs that encode cytostatic or cytotoxic polypeptides. Preferably the mRNA introduced to the target virus contains modified nucleosides or other nucleic acid sequence modifications that the mRNA is translated exclusively, or preferentially, in the target virus, to reduce possible off-target effects of the therapeutic. Such methods are useful for removing viruses from biological material, including blood, semen, eggs, and transplant materials including embryos, tissues, and organs.

### Targeting of Diseased Cells.

[0115] Provided herein are methods for targeting pathogenic or diseased cells, particularly cells that are infected with one or more viruses, using modified mRNAs that encode cytostatic and/or cytotoxic polypeptides. Preferably the mRNA introduced into the target pathogenic cell contains modified nucleosides or other nucleic acid sequence modifications that the mRNA is translated exclusively, or preferentially, in the target pathogenic cell, to reduce possible off-target effects of the therapeutic. Alternatively, the invention provides targeting moieties that are capable of targeting the modified mRNAs to preferentially bind to and enter the target pathogenic cell.

### Methods of Protein Production.

[0116] The methods provided herein are useful for enhancing protein (e.g., an anti-viral polypeptide described herein) product yield in a cell culture process. In a cell culture containing a plurality of host cells, introduction of the modified mRNAs described herein results in increased protein production efficiency relative to a corresponding unmodified nucleic acid. Such increased protein production efficiency can be demonstrated, e.g., by showing increased cell transfection, increased protein translation from the nucleic acid, decreased nucleic acid degradation, and/or reduced innate immune response of the host cell. Protein production can be measured by ELISA, and protein activity can be measured by various functional assays known in the art. The protein production may be generated in a continuous or a fed-batch mammalian process.

[0117] Additionally, it is useful to optimize the expression of a specific polypeptide (e.g., an anti-viral polypeptide described herein) in a cell line or collection of cell lines of potential interest, particularly an engineered protein such as a protein variant of a reference protein having a known activity. In one embodiment, provided is a method of optimizing expression of an engineered protein in a target cell, by providing a plurality of target cell types, and independently contacting with each of the plurality of target cell types a modified mRNA encoding an engineered polypeptide. Additionally, culture conditions may be altered to increase protein production efficiency. Subsequently, the presence and/or level of the engineered polypeptide in the plurality of target cell types is detected and/or quantitated, allowing for the optimization of an engineered polypeptide's expression by selection of an efficient target cell and cell culture conditions relating thereto. Such methods are particularly useful when the engineered polypeptide contains one or more post-translational modifications or has substantial tertiary structure, situations which often complicate efficient protein production.

### Modulation of Biological Pathways.

[0118] The rapid translation of modified mRNAs introduced into cells provides a desirable mechanism of modulating target biological pathways, e.g., biological pathways associated with viral infections and/or diseases, disorders or conditions associated with viral infections. Such modulation includes antagonism or agonism of a given pathway. In one embodiment, a method is provided for antagonizing a biological pathway in a cell by contacting the cell with an effective amount of a composition comprising a modified nucleic acid encoding a recombinant polypeptide, under conditions such that the nucleic acid is localized into the cell and the recombinant polypeptide is capable of being translated in the cell from the nucleic acid, wherein the recombinant polypeptide inhibits the activity of a polypeptide functional in the biological pathway.

[0119] Alternatively, provided are methods of agonizing a biological pathway in a cell by contacting the cell with an effective amount of a modified nucleic acid encoding a recombinant polypeptide under conditions such that the nucleic acid is localized into the cell and the recombinant polypeptide is capable of being translated in the cell from the nucleic acid, and the recombinant polypeptide induces the activity of a polypeptide functional in the biological pathway. Exemplary agonized biological pathways include pathways that modulate anti-viral activity. Such agonization is reversible or, alternatively, irreversible.

### Methods of Cellular Nucleic Acid Delivery.

[0120] Methods of the present invention enhance nucleic acid delivery into a cell population, in vivo, ex vivo, or in culture. For example, a cell culture containing a plurality of host cells (e.g., eukaryotic cells such as yeast or mammalian cells) is contacted with a composition that contains an enhanced nucleic acid having at least one nucleoside modification and, optionally, a translatable region encoding an anti-viral polypeptide, e.g., an anti-viral polypeptide described herein. The composition also generally contains a transfection reagent or other compound that increases the efficiency of enhanced nucleic acid uptake into the host cells. The enhanced nucleic acid exhibits enhanced retention in the cell population, relative to a corresponding unmodified nucleic acid. The retention of the enhanced nucleic acid is greater than the retention of the unmodified nucleic acid. In some embodiments, it is at least about 50%, 75%, 90%, 95%, 100%, 150%, 200% or more than 200% greater than the retention of the unmodified nucleic acid. Such retention advantage may be achieved by one round of transfection with the enhanced nucleic acid, or may be obtained following repeated rounds of transfection.

[0121] In some embodiments, the enhanced nucleic acid is delivered to a target cell population with one or more additional nucleic acids. Such delivery may be at the same time, or the enhanced nucleic acid is delivered prior to delivery of the one or more additional nucleic acids. The additional one or more nucleic acids may be modified nucleic acids or unmodified nucleic acids. It is understood that the initial presence of the enhanced nucleic acids does not substantially induce an innate immune response of the cell population and, moreover, that the innate immune response will not be activated by the later presence of the unmodified nucleic acids. In this regard, the enhanced nucleic acid may not itself contain a translatable region, if the protein desired to be present in the target cell population is translated from the unmodified nucleic acids.

### Pharmaceutical Compositions

[0122] The present invention provides enhanced nucleic acids (e.g., nucleic acids described herein), and complexes containing enhanced nucleic acids associated with other deliverable moieties. Thus, the present invention provides pharmaceutical compositions comprising one or more enhanced nucleic acids, or one or more such complexes, and one or more pharmaceutically acceptable excipients. Pharmaceutical compositions may optionally comprise one or more additional therapeutically active substances. In some embodiments, compositions are administered to humans. For the purposes of the present disclosure, the phrase “active ingredient” generally refers to an enhanced nucleic acid to be delivered as described herein.

[0123] Although the descriptions of pharmaceutical compositions provided herein are principally directed to pharmaceutical compositions which are suitable for administration to humans, it will be understood by the skilled artisan that such compositions are generally suitable for administration to animals of all sorts. Modification of pharmaceutical compositions suitable for administration to humans in order to render the compositions suitable for administration to various animals is well understood, and the ordinarily skilled veterinary pharmacologist can design and/or perform such modification with merely ordinary, if any, experimentation. Subjects to which administration of the pharmaceutical compositions is contemplated include, but are not limited to, humans and/or other animals (e.g., primates, mammals), including commercially relevant mammals such as cattle, pigs, horses, sheep, cats, dogs, mice, and/or rats; and/or birds, including commercially relevant birds such as chickens, ducks, geese, and/or turkeys.

[0124] Formulations of the pharmaceutical compositions described herein may be prepared by any method known or hereafter developed in the art of pharmacology. In general, such preparatory methods include the step of bringing the active ingredient into association with an excipient and/or one or more other accessory ingredients, and then, if necessary and/or desirable, shaping and/or packaging the product into a desired single- or multi-dose unit.

[0125] A pharmaceutical composition in accordance with the invention may be prepared, packaged, and/or sold in bulk, as a single unit dose, and/or as a plurality of single unit doses. As used herein, a “unit dose” is discrete amount of the pharmaceutical composition comprising a predetermined amount of the active ingredient. The amount of the active ingredient is generally equal to the dosage of the active ingredient which would be administered to a subject and/or a convenient fraction of such a dosage such as, for example, one-half or one-third of such a dosage.

[0126] Relative amounts of the active ingredient, the pharmaceutically acceptable excipient, and/or any additional ingredients in a pharmaceutical composition in accordance with the invention will vary, depending upon the identity, size, and/or condition of the subject treated and further depending upon the route by which the composition is to be administered. By way of example, the composition may comprise between 0.1% and 100% (w/w) active ingredient.

[0127] Pharmaceutical formulations may additionally comprise a pharmaceutically acceptable excipient, which, as used herein, includes any and all solvents, dispersion media, diluents, or other liquid vehicles, dispersion or suspension aids, surface active agents, isotonic agents, thickening or emulsifying agents, preservatives, solid binders, lubricants and the like, as suited to the particular dosage form desired. Remington's The Science and Practice of Pharmacy, 21^{st} Edition, A. R. Gennaro (Lippincott, Williams & Wilkins, Baltimore, Md., 2006; incorporated herein by reference) discloses various excipients used in formulating pharmaceutical compositions and known techniques for the preparation thereof. Except insofar as any conventional excipient medium is incompatible with a substance or its derivatives, such as by producing any undesirable biological effect or otherwise interacting in a deleterious manner with any other component(s) of the pharmaceutical composition, its use is contemplated to be within the scope of this invention.

[0128] In some embodiments, a pharmaceutically acceptable excipient is at least 95%, at least 96%, at least 97%, at least 98%, at least 99%, or 100% pure. In some embodiments, an excipient is approved for use in humans and for veterinary use. In some embodiments, an excipient is approved by United States Food and Drug Administration. In some embodiments, an excipient is pharmaceutical grade. In some embodiments, an excipient meets the standards of the United States Pharmacopoeia (USP), the European Pharmacopoeia (EP), the British Pharmacopoeia, and/or the International Pharmacopoeia.

[0129] Pharmaceutically acceptable excipients used in the manufacture of pharmaceutical compositions include, but are not limited to, inert diluents, dispersing and/or granulating agents, surface active agents and/or emulsifiers, disintegrating agents, binding agents, preservatives, buffering agents, lubricating agents, and/or oils. Such excipients may optionally be included in pharmaceutical formulations. Excipients such as cocoa butter and suppository waxes, coloring agents, coating agents, sweetening, flavoring, and/or perfuming agents can be present in the composition, according to the judgment of the formulator.

[0130] Exemplary diluents include, but are not limited to, calcium carbonate, sodium carbonate, calcium phosphate, dicalcium phosphate, calcium sulfate, calcium hydrogen phosphate, sodium phosphate lactose, sucrose, cellulose, microcrystalline cellulose, kaolin, mannitol, sorbitol, inositol, sodium chloride, dry starch, cornstarch, powdered sugar, etc., and/or combinations thereof.

[0131] Exemplary granulating and/or dispersing agents include, but are not limited to, potato starch, corn starch, tapioca starch, sodium starch glycolate, clays, alginic acid, guar gum, citrus pulp, agar, bentonite, cellulose and wood products, natural sponge, cation-exchange resins, calcium carbonate, silicates, sodium carbonate, cross-linked poly(vinyl-pyrrolidone) (crospovidone), sodium carboxymethyl starch (sodium starch glycolate), carboxymethyl cellulose, cross-linked sodium carboxymethyl cellulose (croscarmellose), methylcellulose, pregelatinized starch (starch 1500), microcrystalline starch, water insoluble starch, calcium carboxymethyl cellulose, magnesium aluminum silicate (Veegum), sodium lauryl sulfate, quaternary ammonium compounds, etc., and/or combinations thereof.

[0132] Exemplary surface active agents and/or emulsifiers include, but are not limited to, natural emulsifiers (e.g. acacia, agar, alginic acid, sodium alginate, tragacanth, chondrux, cholesterol, xanthan, pectin, gelatin, egg yolk, casein, wool fat, cholesterol, wax, and lecithin), colloidal clays (e.g. bentonite [aluminum silicate] and Veegum [magnesium aluminum silicate]), long chain amino acid derivatives, high molecular weight alcohols (e.g. stearyl alcohol, cetyl alcohol, oleyl alcohol, triacetin monostearate, ethylene glycol distearate, glyceryl monostearate, and propylene glycol monostearate, polyvinyl alcohol), carbomers (e.g. carboxy polymethylene, polyacrylic acid, acrylic acid polymer, and carboxyvinyl polymer), carrageenan, cellulosic derivatives (e.g. carboxymethylcellulose sodium, powdered cellulose, hydroxymethyl cellulose, hydroxypropyl cellulose, hydroxypropyl methylcellulose, methylcellulose), sorbitan fatty acid esters (e.g. polyoxyethylene sorbitan monolaurate [Tween®20], polyoxyethylene sorbitan [Tween®60], polyoxyethylene sorbitan monooleate [Tween®80], sorbitan monopalmitate [Span®40], sorbitan monostearate [Span®60], sorbitan tristearate [Span® 65], glyceryl monooleate, sorbitan monooleate [Span®80]), polyoxyethylene esters (e.g. polyoxyethylene monostearate [Myrj®45], polyoxyethylene hydrogenated castor oil, polyethoxylated castor oil, polyoxymethylene stearate, and Solutol®), sucrose fatty acid esters, polyethylene glycol fatty acid esters (e.g. Cremophor®), polyoxyethylene ethers, (e.g. polyoxyethylene lauryl ether [Brij® 30]), poly(vinyl-pyrrolidone), diethylene glycol monolaurate, triethanolamine oleate, sodium oleate, potassium oleate, ethyl oleate, oleic acid, ethyl laurate, sodium lauryl sulfate, Pluronic®F 68, Poloxamer®188, cetrimonium bromide, cetylpyridinium chloride, benzalkonium chloride, docusate sodium, etc. and/or combinations thereof.

[0133] Exemplary binding agents include, but are not limited to, starch (e.g. cornstarch and starch paste); gelatin; sugars (e.g. sucrose, glucose, dextrose, dextrin, molasses, lactose, lactitol, mannitol); natural and synthetic gums (e.g. acacia, sodium alginate, extract of Irish moss, panwar gum, ghatti gum, mucilage of isapol husks, carboxymethylcellulose, methylcellulose, ethylcellulose, hydroxyethylcellulose, hydroxypropyl cellulose, hydroxypropyl methylcellulose, microcrystalline cellulose, cellulose acetate, poly(vinyl-pyrrolidone), magnesium aluminum silicate (Veegum®), and larch arabogalactan); alginates; polyethylene oxide; polyethylene glycol; inorganic calcium salts; silicic acid; polymethacrylates; waxes; water; alcohol; etc.; and combinations thereof.

[0134] Exemplary preservatives may include, but are not limited to, antioxidants, chelating agents, antimicrobial preservatives, antifungal preservatives, alcohol preservatives, acidic preservatives, and/or other preservatives. Exemplary antioxidants include, but are not limited to, alpha tocopherol, ascorbic acid, acorbyl palmitate, butylated hydroxyanisole, butylated hydroxytoluene, monothioglycerol, potassium metabisulfite, propionic acid, propyl gallate, sodium ascorbate, sodium bisulfite, sodium metabisulfite, and/or sodium sulfite. Exemplary chelating agents include ethylenediaminetetraacetic acid (EDTA), citric acid monohydrate, disodium edetate, dipotassium edetate, edetic acid, fumaric acid, malic acid, phosphoric acid, sodium edetate, tartaric acid, and/or trisodium edetate. Exemplary antimicrobial preservatives include, but are not limited to, benzalkonium chloride, benzethonium chloride, benzyl alcohol, bronopol, cetrimide, cetylpyridinium chloride, chlorhexidine, chlorobutanol, chlorocresol, chloroxylenol, cresol, ethyl alcohol, glycerin, hexetidine, imidurea, phenol, phenoxyethanol, phenylethyl alcohol, phenylmercuric nitrate, propylene glycol, and/or thimerosal. Exemplary antifungal preservatives include, but are not limited to, butyl paraben, methyl paraben, ethyl paraben, propyl paraben, benzoic acid, hydroxybenzoic acid, potassium benzoate, potassium sorbate, sodium benzoate, sodium propionate, and/or sorbic acid. Exemplary alcohol preservatives include, but are not limited to, ethanol, polyethylene glycol, phenol, phenolic compounds, bisphenol, chlorobutanol, hydroxybenzoate, and/or phenylethyl alcohol. Exemplary acidic preservatives include, but are not limited to, vitamin A, vitamin C, vitamin E, beta-carotene, citric acid, acetic acid, dehydroacetic acid, ascorbic acid, sorbic acid, and/or phytic acid. Other preservatives include, but are not limited to, tocopherol, tocopherol acetate, deteroxime mesylate, cetrimide, butylated hydroxyanisol (BHA), butylated hydroxytoluened (BHT), ethylenediamine, sodium lauryl sulfate (SLS), sodium lauryl ether sulfate (SLES), sodium bisulfite, sodium metabisulfite, potassium sulfite, potassium metabisulfite, Glydant Plus®, Phenonip®, methylparaben, Germall® 115, Germaben®II, Neolone™, Kathon™, and/or Euxyl®.

[0135] Exemplary buffering agents include, but are not limited to, citrate buffer solutions, acetate buffer solutions, phosphate buffer solutions, ammonium chloride, calcium carbonate, calcium chloride, calcium citrate, calcium glubionate, calcium gluceptate, calcium gluconate, D-gluconic acid, calcium glycerophosphate, calcium lactate, propanoic acid, calcium levulinate, pentanoic acid, dibasic calcium phosphate, phosphoric acid, tribasic calcium phosphate, calcium hydroxide phosphate, potassium acetate, potassium chloride, potassium gluconate, potassium mixtures, dibasic potassium phosphate, monobasic potassium phosphate, potassium phosphate mixtures, sodium acetate, sodium bicarbonate, sodium chloride, sodium citrate, sodium lactate, dibasic sodium phosphate, monobasic sodium phosphate, sodium phosphate mixtures, tromethamine, magnesium hydroxide, aluminum hydroxide, alginic acid, pyrogen-free water, isotonic saline, Ringer's solution, ethyl alcohol, etc., and/or combinations thereof.

[0136] Exemplary lubricating agents include, but are not limited to, magnesium stearate, calcium stearate, stearic acid, silica, talc, malt, glyceryl behanate, hydrogenated vegetable oils, polyethylene glycol, sodium benzoate, sodium acetate, sodium chloride, leucine, magnesium lauryl sulfate, sodium lauryl sulfate, etc., and combinations thereof.

[0137] Exemplary oils include, but are not limited to, almond, apricot kernel, avocado, babassu, bergamot, black current seed, borage, cade, camomile, canola, caraway, carnauba, castor, cinnamon, cocoa butter, coconut, cod liver, coffee, corn, cotton seed, emu, eucalyptus, evening primrose, fish, flaxseed, geraniol, gourd, grape seed, hazel nut, hyssop, isopropyl myristate, jojoba, kukui nut, lavandin, lavender, lemon, litsea cubeba, macademia nut, mallow, mango seed, meadowfoam seed, mink, nutmeg, olive, orange, orange roughy, palm, palm kernel, peach kernel, peanut, poppy seed, pumpkin seed, rapeseed, rice bran, rosemary, safflower, sandalwood, sasquana, savoury, sea buckthorn, sesame, shea butter, silicone, soybean, sunflower, tea tree, thistle, tsubaki, vetiver, walnut, and wheat germ oils. Exemplary oils include, but are not limited to, butyl stearate, caprylic triglyceride, capric triglyceride, cyclomethicone, diethyl sebacate, dimethicone 360, isopropyl myristate, mineral oil, octyldodecanol, oleyl alcohol, silicone oil, and/or combinations thereof.

[0138] Liquid dosage forms for oral and parenteral administration include, but are not limited to, pharmaceutically acceptable emulsions, microemulsions, solutions, suspensions, syrups, and/or elixirs. In addition to active ingredients, liquid dosage forms may comprise inert diluents commonly used in the art such as, for example, water or other solvents, solubilizing agents and emulsifiers such as ethyl alcohol, isopropyl alcohol, ethyl carbonate, ethyl acetate, benzyl alcohol, benzyl benzoate, propylene glycol, 1,3-butylene glycol, dimethylformamide, oils (in particular, cottonseed, groundnut, corn, germ, olive, castor, and sesame oils), glycerol, tetrahydrofurfuryl alcohol, polyethylene glycols and fatty acid esters of sorbitan, and mixtures thereof. Besides inert diluents, oral compositions can include adjuvants such as wetting agents, emulsifying and suspending agents, sweetening, flavoring, and/or perfuming agents. In certain embodiments for parenteral administration, compositions are mixed with solubilizing agents such as Cremophor®, alcohols, oils, modified oils, glycols, polysorbates, cyclodextrins, polymers, and/or combinations thereof.

[0139] Injectable preparations, for example, sterile injectable aqueous or oleaginous suspensions may be formulated according to the known art using suitable dispersing agents, wetting agents, and/or suspending agents. Sterile injectable preparations may be sterile injectable solutions, suspensions, and/or emulsions in nontoxic parenterally acceptable diluents and/or solvents, for example, as a solution in 1,3-butanediol. Among the acceptable vehicles and solvents that may be employed are water, Ringer's solution, U.S.P., and isotonic sodium chloride solution. Sterile, fixed oils are conventionally employed as a solvent or suspending medium. For this purpose any bland fixed oil can be employed including synthetic mono- or diglycerides. Fatty acids such as oleic acid can be used in the preparation of injectables.

[0140] Injectable formulations can be sterilized, for example, by filtration through a bacterial-retaining filter, and/or by incorporating sterilizing agents in the form of sterile solid compositions which can be dissolved or dispersed in sterile water or other sterile injectable medium prior to use.

[0141] In order to prolong the effect of an active ingredient, it is often desirable to slow the absorption of the active ingredient from subcutaneous or intramuscular injection. This may be accomplished by the use of a liquid suspension of crystalline or amorphous material with poor water solubility. The rate of absorption of the drug then depends upon its rate of dissolution which, in turn, may depend upon crystal size and crystalline form. Alternatively, delayed absorption of a parenterally administered drug form is accomplished by dissolving or suspending the drug in an oil vehicle. Injectable depot forms are made by forming microencapsule matrices of the drug in biodegradable polymers such as polylactide-polyglycolide. Depending upon the ratio of drug to polymer and the nature of the particular polymer employed, the rate of drug release can be controlled. Examples of other biodegradable polymers include poly(orthoesters) and poly(anhydrides). Depot injectable formulations are prepared by entrapping the drug in liposomes or microemulsions which are compatible with body tissues.

[0142] Compositions for rectal or vaginal administration are typically suppositories which can be prepared by mixing compositions with suitable non-irritating excipients such as cocoa butter, polyethylene glycol or a suppository wax which are solid at ambient temperature but liquid at body temperature and therefore melt in the rectum or vaginal cavity and release the active ingredient. Solid dosage forms for oral administration include capsules, tablets, pills, powders, and granules. In such solid dosage forms, an active ingredient is mixed with at least one inert, pharmaceutically acceptable excipient such as sodium citrate or dicalcium phosphate and/or fillers or extenders (e.g. starches, lactose, sucrose, glucose, mannitol, and silicic acid), binders (e.g. carboxymethylcellulose, alginates, gelatin, polyvinylpyrrolidinone, sucrose, and acacia), humectants (e.g. glycerol), disintegrating agents (e.g. agar, calcium carbonate, potato or tapioca starch, alginic acid, certain silicates, and sodium carbonate), solution retarding agents (e.g. paraffin), absorption accelerators (e.g. quaternary ammonium compounds), wetting agents (e.g. cetyl alcohol and glycerol monostearate), absorbents (e.g. kaolin and bentonite clay), and lubricants (e.g. talc, calcium stearate, magnesium stearate, solid polyethylene glycols, sodium lauryl sulfate), and mixtures thereof. In the case of capsules, tablets and pills, the dosage form may comprise buffering agents.

[0143] Solid compositions of a similar type may be employed as fillers in soft and hard-filled gelatin capsules using such excipients as lactose or milk sugar as well as high molecular weight polyethylene glycols and the like. Solid dosage forms of tablets, dragees, capsules, pills, and granules can be prepared with coatings and shells such as enteric coatings and other coatings well known in the pharmaceutical formulating art. They may optionally comprise opacifying agents and can be of a composition that they release the active ingredient(s) only, or preferentially, in a certain part of the intestinal tract, optionally, in a delayed manner. Examples of embedding compositions which can be used include polymeric substances and waxes. Solid compositions of a similar type may be employed as fillers in soft and hard-filled gelatin capsules using such excipients as lactose or milk sugar as well as high molecular weight polyethylene glycols and the like.

[0144] Dosage forms for topical and/or transdermal administration of a composition may include ointments, pastes, creams, lotions, gels, powders, solutions, sprays, inhalants and/or patches. Generally, an active ingredient is admixed under sterile conditions with a pharmaceutically acceptable excipient and/or any needed preservatives and/or buffers as may be required. Additionally, the present invention contemplates the use of transdermal patches, which often have the added advantage of providing controlled delivery of a compound to the body. Such dosage forms may be prepared, for example, by dissolving and/or dispensing the compound in the proper medium. Alternatively or additionally, rate may be controlled by either providing a rate controlling membrane and/or by dispersing the compound in a polymer matrix and/or gel.

[0145] Suitable devices for use in delivering intradermal pharmaceutical compositions described herein include short needle devices such as those described in U.S. Pat. Nos. 4,886,499; 5,190,521; 5,328,483; 5,527,288; 4,270,537; 5,015,235; 5,141,496; and 5,417,662. Intradermal compositions may be administered by devices which limit the effective penetration length of a needle into the skin, such as those described in PCT publication WO 99/34850 and functional equivalents thereof. Jet injection devices which deliver liquid compositions to the dermis via a liquid jet injector and/or via a needle which pierces the stratum corneum and produces a jet which reaches the dermis are suitable. Jet injection devices are described, for example, in U.S. Pat. Nos. 5,480,381; 5,599,302; 5,334,144; 5,993,412; 5,649,912; 5,569,189; 5,704,911; 5,383,851; 5,893,397; 5,466,220; 5,339,163; 5,312,335; 5,503,627; 5,064,413; 5,520,639; 4,596,556; 4,790,824; 4,941,880; 4,940,460; and PCT publications WO 97/37705 and WO 97/13537. Ballistic powder/particle delivery devices which use compressed gas to accelerate vaccine in powder form through the outer layers of the skin to the dermis are suitable. Alternatively or additionally, conventional syringes may be used in the classical mantoux method of intradermal administration.

[0146] Formulations suitable for topical administration include, but are not limited to, liquid and/or semi liquid preparations such as liniments, lotions, oil in water and/or water in oil emulsions such as creams, ointments and/or pastes, and/or solutions and/or suspensions. Topically-administrable formulations may, for example, comprise from about 1% to about 10% (w/w) active ingredient, although the concentration of active ingredient may be as high as the solubility limit of the active ingredient in the solvent. Formulations for topical administration may further comprise one or more of the additional ingredients described herein.

[0147] A pharmaceutical composition may be prepared, packaged, and/or sold in a formulation suitable for pulmonary administration via the buccal cavity. Such a formulation may comprise dry particles which comprise the active ingredient and which have a diameter in the range from about 0.5 nm to about 7 nm or from about 1 nm to about 6 nm. Such compositions are suitably in the form of dry powders for administration using a device comprising a dry powder reservoir to which a stream of propellant may be directed to disperse the powder and/or using a self propelling solvent/powder dispensing container such as a device comprising the active ingredient dissolved and/or suspended in a low-boiling propellant in a sealed container. Such powders comprise particles wherein at least 98% of the particles by weight have a diameter greater than 0.5 nm and at least 95% of the particles by number have a diameter less than 7 nm. Alternatively, at least 95% of the particles by weight have a diameter greater than 1 nm and at least 90% of the particles by number have a diameter less than 6 nm. Dry powder compositions may include a solid fine powder diluent such as sugar and are conveniently provided in a unit dose form.

[0148] Low boiling propellants generally include liquid propellants having a boiling point of below 65° F. at atmospheric pressure. Generally the propellant may constitute 50% to 99.9% (w/w) of the composition, and active ingredient may constitute 0.1% to 20% (w/w) of the composition. A propellant may further comprise additional ingredients such as a liquid non-ionic and/or solid anionic surfactant and/or a solid diluent (which may have a particle size of the same order as particles comprising the active ingredient).

[0149] Pharmaceutical compositions formulated for pulmonary delivery may provide an active ingredient in the form of droplets of a solution and/or suspension. Such formulations may be prepared, packaged, and/or sold as aqueous and/or dilute alcoholic solutions and/or suspensions, optionally sterile, comprising active ingredient, and may conveniently be administered using any nebulization and/or atomization device. Such formulations may further comprise one or more additional ingredients including, but not limited to, a flavoring agent such as saccharin sodium, a volatile oil, a buffering agent, a surface active agent, and/or a preservative such as methylhydroxybenzoate. Droplets provided by this route of administration may have an average diameter in the range from about 0.1 nm to about 200 nm.

[0150] Formulations described herein as being useful for pulmonary delivery are useful for intranasal delivery of a pharmaceutical composition. Another formulation suitable for intranasal administration is a coarse powder comprising the active ingredient and having an average particle from about 0.2 μm to 500 μm. Such a formulation is administered in the manner in which snuff is taken, i.e. by rapid inhalation through the nasal passage from a container of the powder held close to the nose.

[0151] Formulations suitable for nasal administration may, for example, comprise from about as little as 0.1% (w/w) and as much as 100% (w/w) of active ingredient, and may comprise one or more of the additional ingredients described herein. A pharmaceutical composition may be prepared, packaged, and/or sold in a formulation suitable for buccal administration. Such formulations may, for example, be in the form of tablets and/or lozenges made using conventional methods, and may have, for example, 0.1% to 20% (w/w) active ingredient, the balance comprising an orally dissolvable and/or degradable composition and, optionally, one or more of the additional ingredients described herein. Alternately, formulations suitable for buccal administration may comprise a powder and/or an aerosolized and/or atomized solution and/or suspension comprising active ingredient. Such powdered, aerosolized, and/or aerosolized formulations, when dispersed, may have an average particle and/or droplet size in the range from about 0.1 nm to about 200 nm, and may further comprise one or more of any additional ingredients described herein.

[0152] A pharmaceutical composition may be prepared, packaged, and/or sold in a formulation suitable for ophthalmic administration. Such formulations may, for example, be in the form of eye drops including, for example, a 0.1/1.0% (w/w) solution and/or suspension of the active ingredient in an aqueous or oily liquid excipient. Such drops may further comprise buffering agents, salts, and/or one or more other of any additional ingredients described herein. Other opthalmically-administrable formulations which are useful include those which comprise the active ingredient in microcrystalline form and/or in a liposomal preparation. Ear drops and/or eye drops are contemplated as being within the scope of this invention.

[0153] General considerations in the formulation and/or manufacture of pharmaceutical agents may be found, for example, in Remington: The Science and Practice of Pharmacy 21^{st} ed., Lippincott Williams & Wilkins, 2005 (incorporated herein by reference).

[0154] The present invention provides methods comprising administering modified mRNAs and their encoded proteins or complexes in accordance with the invention to a subject in need thereof. Nucleic acids, proteins or complexes, or pharmaceutical, imaging, diagnostic, or prophylactic compositions thereof, may be administered to a subject using any amount and any route of administration effective for preventing, treating, diagnosing, or imaging a disease, disorder, and/or condition (e.g., a disease, disorder, and/or condition relating to viral infections). The exact amount required will vary from subject to subject, depending on the species, age, and general condition of the subject, the severity of the disease, the particular composition, its mode of administration, its mode of activity, and the like. Compositions in accordance with the invention are typically formulated in dosage unit form for ease of administration and uniformity of dosage. It will be understood, however, that the total daily usage of the compositions of the present invention will be decided by the attending physician within the scope of sound medical judgment. The specific therapeutically effective, prophylactially effective, or appropriate imaging dose level for any particular patient will depend upon a variety of factors including the disorder being treated and the severity of the disorder; the activity of the specific compound employed; the specific composition employed; the age, body weight, general health, sex and diet of the patient; the time of administration, route of administration, and rate of excretion of the specific compound employed; the duration of the treatment; drugs used in combination or coincidental with the specific compound employed; and like factors well known in the medical arts.

[0155] Devices may also be used in conjunction with the present invention. In one embodiment, a device is used to assess levels of a protein which has been administered in the form of a modified mRNA. The device may comprise a blood, urine or other biofluidic test. It may be as large as to include an automated central lab platform or a small decentralized bench top device.

### Kits.

[0156] The invention provides a variety of kits for conveniently and/or effectively carrying out methods of the present invention. Typically kits will comprise sufficient amounts and/or numbers of components to allow a user to perform multiple treatments of a subject(s) and/or to perform multiple experiments.

[0157] In one embodiment, the levels of a modified mRNA of the present invention may be measured by immunoassay. In this embodiment, the assay may be used to assess levels of modified mRNA or its activated form or a variant delivered as or in response to the administration of the modified mRNA.

### Dressings and Bandages.

[0158] The invention provides a variety of dressings (e.g., wound dressings) or bandages (e.g., adhesive bandages) for conveniently and/or effectively carrying out methods of the present invention. Typically dressings or bandages will comprise sufficient amounts of pharmaceutical compositions and/or modified nucleic acids described herein to allow a user to perform multiple treatments of a subject(s).

### Animal Models.

[0159] Anti-viral agents can be tested in healthy animals (e.g., mice) exposed to specific viral pathogens. Anti-viral agents can also be tested in immunodeficient animal (e.g., mouse) models to test infection process without interference from other immune mechanisms except innate immunity.

[0160] Severe Combined Immunodeficiency (SCID) is a severe immunodeficiency genetic disorder that is characterized by the complete inability of the adaptive immune system to mount, coordinate, and sustain an appropriate immune response, usually due to absent or atypical T and B lymphocytes. Scid mice are important tools for researching hematopoiesis, innate and adaptive immunity, autoimmunity, infectious diseases, cancer, vaccine development, and regenerative medicine in vivo.

[0161] Strain NOD.Cg-Prkdc^{scid} Il2rg^{tm1Wjl}/SzJ (005557 Jacson Lab), commonly known as NOD scid gamma (NSG), is the latest breakthrough in the development of immunodeficient models. It combines the innate immunity deficiencies of the NOD/ShiLtJ background, the scid mutation, and IL2 receptor gamma chain (Il2rg) deficiency. The latter two deficiencies combine to eliminate mature T cells, B cells, and NK cells. Because the Il2rg knockout prevents the development of lymphoma, NSG mice survive longer than other scid strains, enabling long-term experiments.

[0162] The B6 scid-strain B6.CB17-Prkdc^{scid}/SzJ (001913, Jacson Lab), B6 scid mice lack most B and T cells. B6 scid is more severely immunodeficient and supports better engraftment of allogeneic and xenogeneic cells, tissues, and tumors than Foxn1^{nu} mutant strains.

[0163] The humanized mouse model of HIV infection to investigate mechanisms of viral dissemination, of HIV-induced immune activation, and of HIV-induced immune dysfunction can be used too MGH. Another mouse model—EcoHIV infected about 75 percent of the mice tested, an efficiency rate comparable with that of HIV in humans. The EcoHIV infection was present in immune cells and white blood cells, the spleen, abdominal cavity and brain.

[0164] C57BL/6-Btk^{tm1Arte} 9723-F-mouse model for Bruton's disease. Bruton's tyrosine kinase (Btk) is a member of the Tec kinase family and has been implicated in the primary immunodeficiency X-linked agammaglobulinemia. Btk is thought to play multiple roles in the haematopoietic system, including B-cell development, stimulation of mast cells and the onset of autoimmune diseases. The Btk (Bruton's tyrosine kinase) KinaseSwitch mouse strain carries point mutations at the genomic level at positions T474A/S538A in the ATP binding pocket of the Btk kinase domain (BtkT474A/S538A).

### DEFINITIONS

[0165] Therapeutic Agent: The term “therapeutic agent” refers to any agent that, when administered to a subject, has a therapeutic, diagnostic, and/or prophylactic effect and/or elicits a desired biological and/or pharmacological effect.

[0166] Administered in combination: As used herein, the term “administered in combination” or “combined administration” means that two or more agents (e.g., a modified nucleic acid encoding an anti-viral polypeptide, e.g., an anti-viral polypeptide described herein, and an anti-viral agent (e.g., an anti-viral polypeptide or a small molecule anti-viral compound described herein)) are administered to a subject at the same time or within an interval such that there is overlap of an effect of each agent on the patient. In some embodiments, they are administered within about 60, 30, 15, 10, 5, or 1 minute of one another. In some embodiments, the administrations of the agents are spaced sufficiently close together such that a combinatorial (e.g., a synergistic) effect is achieved.

[0167] Animal: As used herein, the term “animal” refers to any member of the animal kingdom. In some embodiments, “animal” refers to humans at any stage of development. In some embodiments, “animal” refers to non-human animals at any stage of development. In certain embodiments, the non-human animal is a mammal (e.g., a rodent, a mouse, a rat, a rabbit, a monkey, a dog, a cat, a sheep, cattle, a primate, or a pig). In some embodiments, animals include, but are not limited to, mammals, birds, reptiles, amphibians, fish, and worms. In some embodiments, the animal is a transgenic animal, genetically-engineered animal, or a clone.

[0168] Approximately: As used herein, the term “approximately” or “about,” as applied to one or more values of interest, refers to a value that is similar to a stated reference value. In certain embodiments, the term “approximately” or “about” refers to a range of values that fall within 25%, 20%, 19%, 18%, 17%, 16%, 15%, 14%, 13%, 12%, 11%, 10%, 9%, 8%, 7%, 6%, 5%, 4%, 3%, 2%, 1%, or less in either direction (greater than or less than) of the stated reference value unless otherwise stated or otherwise evident from the context (except where such number would exceed 100% of a possible value).

[0169] Associated with: As used herein, the terms “associated with,” “conjugated,” “linked,” “attached,” and “tethered,” when used with respect to two or more moieties, means that the moieties are physically associated or connected with one another, either directly or via one or more additional moieties that serves as a linking agent, to form a structure that is sufficiently stable so that the moieties remain physically associated under the conditions in which the structure is used, e.g., physiological conditions. As used herein, the terms “associated with,” when used with respect to a virus and a disease, disorder, or condition, means the virus is found more frequently (e.g., at least 10%, 25%, 50%, 75%, 100%, 200%, 500%, 1000% more frequently) in patients with the disease, disorder, or condition than in healthy controls and/or there is a frequent co-occurrence of the virus in the disease, disorder, or condition. In some embodiments, the virus can be a direct and/or singular cause of the disease, disorder, or condition. In some embodiments, the virus can be a necessary, but not sufficient, cause of the disease, disorder, or condition (e.g., only causes the disease, disorder or condition in combination with one or more other causal factors (e.g., genetic factors, or toxin exposure)). In some embodiments, the virus can predispose to the development of or increase the risk of getting the disease, disorder, or condition. In some embodiments, the virus can also be an “innocent bystander” that plays no significant role in the etiology of the disease, disorder, or condition but is more prevalent in patients with the disease, disorder, or condition for some reason such as the compromised immune response caused by the disease, disorder, or condition.

[0170] Biologically active: As used herein, the phrase “biologically active” refers to a characteristic of any substance that has activity in a biological system and/or organism. For instance, a substance that, when administered to an organism, has a biological effect on that organism, is considered to be biologically active. In particular embodiments, where a nucleic acid is biologically active, a portion of that nucleic acid that shares at least one biological activity of the whole nucleic acid is typically referred to as a “biologically active” portion.

[0171] Conserved: As used herein, the term “conserved” refers to nucleotides or amino acid residues of a polynucleotide sequence or amino acid sequence, respectively, that are those that occur unaltered in the same position of two or more related sequences being compared. Nucleotides or amino acids that are relatively conserved are those that are conserved amongst more related sequences than nucleotides or amino acids appearing elsewhere in the sequences. In some embodiments, two or more sequences are said to be “completely conserved” if they are 100% identical to one another. In some embodiments, two or more sequences are said to be “highly conserved” if they are at least 70% identical, at least 80% identical, at least 90% identical, or at least 95% identical to one another. In some embodiments, two or more sequences are said to be “highly conserved” if they are about 70% identical, about 80% identical, about 90% identical, about 95%, about 98%, or about 99% identical to one another. In some embodiments, two or more sequences are said to be “conserved” if they are at least 30% identical, at least 40% identical, at least 50% identical, at least 60% identical, at least 70% identical, at least 80% identical, at least 90% identical, or at least 95% identical to one another. In some embodiments, two or more sequences are said to be “conserved” if they are about 30% identical, about 40% identical, about 50% identical, about 60% identical, about 70% identical, about 80% identical, about 90% identical, about 95% identical, about 98% identical, or about 99% identical to one another.

[0172] Cytostatic: As used herein, “cytostatic” refers to inhibiting, reducing, suppressing the growth, division, or multiplication of a cell (e.g., a mammalian cell (e.g., a human cell)), bacterium, virus, fungus, protozoan, parasite, prion, or a combination thereof.

[0173] Cytotoxic: As used herein, “cytotoxic” refers to killing or causing injurous, toxic, or deadly effect on a cell (e.g., a mammalian cell (e.g., a human cell)), bacterium, virus, fungus, protozoan, parasite, prion, or a combination thereof.

[0174] Expression: As used herein, “expression” of a nucleic acid sequence refers to one or more of the following events: (1) production of an RNA template from a DNA sequence (e.g., by transcription); (2) processing of an RNA transcript (e.g., by splicing, editing, 5′ cap formation, and/or 3′ end processing); (3) translation of an RNA into a polypeptide or protein; and (4) post-translational modification of a polypeptide or protein.

[0175] Functional: As used herein, a “functional” biological molecule is a biological molecule in a form in which it exhibits a property and/or activity by which it is characterized.

[0176] Homology: As used herein, the term “homology” refers to the overall relatedness between polymeric molecules, e.g. between nucleic acid molecules (e.g. DNA molecules and/or RNA molecules) and/or between polypeptide molecules. In some embodiments, polymeric molecules are considered to be “homologous” to one another if their sequences are at least 25%, at least 30%, at least 35%, at least 40%, at least 45%, at least 50%, at least 55%, at least 60%, at least 65%, at least 70%, at least 75%, at least 80%, at least 85%, at least 90%, at least 95%, or at least 99% identical. In some embodiments, polymeric molecules are considered to be “homologous” to one another if their sequences are at least 25%, at least 30%, at least 35%, at least 40%, at least 45%, at least 50%, at least 55%, at least 60%, at least 65%, at least 70%, at least 75%, at least 80%, at least 85%, at least 90%, at least 95%, or at least 99% similar. The term “homologous” necessarily refers to a comparison between at least two sequences (nucleotides sequences or amino acid sequences). In accordance with the invention, two nucleotide sequences are considered to be homologous if the polypeptides they encode are at least about 50% identical, at least about 60% identical, at least about 70% identical, at least about 80% identical, or at least about 90% identical for at least one stretch of at least about 20 amino acids. In some embodiments, homologous nucleotide sequences are characterized by the ability to encode a stretch of at least 4-5 uniquely specified amino acids. Both the identity and the approximate spacing of these amino acids relative to one another must be considered for nucleotide sequences to be considered homologous. For nucleotide sequences less than 60 nucleotides in length, homology is determined by the ability to encode a stretch of at least 4-5 uniquely specified amino acids. In accordance with the invention, two protein sequences are considered to be homologous if the proteins are at least about 50% identical, at least about 60% identical, at least about 70% identical, at least about 80% identical, or at least about 90% identical for at least one stretch of at least about 20 amino acids.

[0177] Identity: As used herein, the term “identity” refers to the overall relatedness between polymeric molecules, e.g., between nucleic acid molecules (e.g. DNA molecules and/or RNA molecules) and/or between polypeptide molecules. Calculation of the percent identity of two nucleic acid sequences, for example, can be performed by aligning the two sequences for optimal comparison purposes (e.g., gaps can be introduced in one or both of a first and a second nucleic acid sequences for optimal alignment and non-identical sequences can be disregarded for comparison purposes). In certain embodiments, the length of a sequence aligned for comparison purposes is at least 30%, at least 40%, at least 50%, at least 60%, at least 70%, at least 80%, at least 90%, at least 95%, or 100% of the length of the reference sequence. The nucleotides at corresponding nucleotide positions are then compared. When a position in the first sequence is occupied by the same nucleotide as the corresponding position in the second sequence, then the molecules are identical at that position. The percent identity between the two sequences is a function of the number of identical positions shared by the sequences, taking into account the number of gaps, and the length of each gap, which needs to be introduced for optimal alignment of the two sequences. The comparison of sequences and determination of percent identity between two sequences can be accomplished using a mathematical algorithm. For example, the percent identity between two nucleotide sequences can be determined using methods such as those described in Computational Molecular Biology, Lesk, A. M., ed., Oxford University Press, New York, 1988; Biocomputing: Informatics and Genome Projects, Smith, D. W., ed., Academic Press, New York, 1993; Sequence Analysis in Molecular Biology, von Heinje, G., Academic Press, 1987; Computer Analysis of Sequence Data, Part I, Griffin, A. M., and Griffin, H. G., eds., Humana Press, New Jersey, 1994; and Sequence Analysis Primer, Gribskov, M. and Devereux, J., eds., M Stockton Press, New York, 1991; each of which is incorporated herein by reference. For example, the percent identity between two nucleotide sequences can be determined using the algorithm of Meyers and Miller (CABIOS, 1989, 4:11-17), which has been incorporated into the ALIGN program (version 2.0) using a PAM120 weight residue table, a gap length penalty of 12 and a gap penalty of 4. The percent identity between two nucleotide sequences can, alternatively, be determined using the GAP program in the GCG software package using an NWSgapdna.CMP matrix. Methods commonly employed to determine percent identity between sequences include, but are not limited to those disclosed in Carillo, H., and Lipman, D., SIAM J Applied Math., 48:1073 (1988); incorporated herein by reference. Techniques for determining identity are codified in publicly available computer programs. Exemplary computer software to determine homology between two sequences include, but are not limited to, GCG program package, Devereux, J., et al., Nucleic Acids Research, 12(1), 387 (1984)), BLASTP, BLASTN, and FASTA Atschul, S. F. et al., J. Molec. Biol., 215, 403 (1990)).

[0178] Inhibit expression of a gene: As used herein, the phrase “inhibit expression of a gene” means to cause a reduction in the amount of an expression product of the gene. The expression product can be an RNA transcribed from the gene (e.g., an mRNA) or a polypeptide translated from an mRNA transcribed from the gene. Typically a reduction in the level of an mRNA results in a reduction in the level of a polypeptide translated therefrom. The level of expression may be determined using standard techniques for measuring mRNA or protein.

[0179] In vitro: As used herein, the term “in vitro” refers to events that occur in an artificial environment, e.g., in a test tube or reaction vessel, in cell culture, in a Petri dish, etc., rather than within an organism (e.g., animal, plant, or microbe).

[0180] In vivo: As used herein, the term “in vivo” refers to events that occur within an organism (e.g., animal, plant, or microbe).

[0181] Isolated: As used herein, the term “isolated” refers to a substance or entity that has been (1) separated from at least some of the components with which it was associated when initially produced (whether in nature or in an experimental setting), and/or (2) produced, prepared, and/or manufactured by the hand of man. Isolated substances and/or entities may be separated from at least about 10%, about 20%, about 30%, about 40%, about 50%, about 60%, about 70%, about 80%, about 90%, or more of the other components with which they were initially associated. In some embodiments, isolated agents are more than about 80%, about 85%, about 90%, about 91%, about 92%, about 93%, about 94%, about 95%, about 96%, about 97%, about 98%, about 99%, or more than about 99% pure. As used herein, a substance is “pure” if it is substantially free of other components.

[0182] Preventing: As used herein, the term “preventing” refers to partially or completely delaying onset of a viral infection; partially or completely delaying onset of one or more symptoms, features, or clinical manifestations of a particular disease, disorder, and/or condition associated with a viral infection; partially or completely delaying onset of one or more symptoms, features, or manifestations of a particular disease, disorder, and/or condition prior to an identifiable viral infection; partially or completely delaying progression from an latent viral infection to an active viral infection or a particular disease, disorder and/or condition; and/or decreasing the risk of developing pathology associated with the viral infection or the disease, disorder, and/or condition.

[0183] Similarity: As used herein, the term “similarity” refers to the overall relatedness between polymeric molecules, e.g. between nucleic acid molecules (e.g. DNA molecules and/or RNA molecules) and/or between polypeptide molecules. Calculation of percent similarity of polymeric molecules to one another can be performed in the same manner as a calculation of percent identity, except that calculation of percent similarity takes into account conservative substitutions as is understood in the art.

[0184] Subject: As used herein, the term “subject” or “patient” refers to any organism to which a composition in accordance with the invention may be administered, e.g., for experimental, diagnostic, prophylactic, and/or therapeutic purposes. Typical subjects include animals (e.g., mammals such as mice, rats, rabbits, non-human primates, and humans) and/or plants.

[0185] Substantially: As used herein, the term “substantially” refers to the qualitative condition of exhibiting total or near-total extent or degree of a characteristic or property of interest. One of ordinary skill in the biological arts will understand that biological and chemical phenomena rarely, if ever, go to completion and/or proceed to completeness or achieve or avoid an absolute result. The term “substantially” is therefore used herein to capture the potential lack of completeness inherent in many biological and chemical phenomena.

[0186] Suffering from: An individual who is “suffering from” a disease, disorder, and/or condition has been diagnosed with or displays one or more symptoms of a disease, disorder, and/or condition.

[0187] Susceptible to: An individual who is “susceptible to” a disease, disorder, and/or condition has not been diagnosed with and/or may not exhibit symptoms of the disease, disorder, and/or condition. In some embodiments, an individual who is susceptible to a disease, disorder, and/or condition (for example, cancer) may be characterized by one or more of the following: (1) a genetic mutation associated with development of the disease, disorder, and/or condition; (2) a genetic polymorphism associated with development of the disease, disorder, and/or condition; (3) increased and/or decreased expression and/or activity of a protein and/or nucleic acid associated with the disease, disorder, and/or condition; (4) habits and/or lifestyles associated with development of the disease, disorder, and/or condition; (5) a family history of the disease, disorder, and/or condition; and (6) exposure to and/or infection with a microbe associated with development of the disease, disorder, and/or condition. In some embodiments, an individual who is susceptible to a disease, disorder, and/or condition will develop the disease, disorder, and/or condition. In some embodiments, an individual who is susceptible to a disease, disorder, and/or condition will not develop the disease, disorder, and/or condition.

[0188] Therapeutically effective amount: As used herein, the term “therapeutically effective amount” means an amount of an agent to be delivered (e.g., nucleic acid, drug, therapeutic agent, diagnostic agent, prophylactic agent, etc.) that is sufficient, when administered to a subject suffering from or susceptible to a disease, disorder, and/or condition, to treat, improve symptoms of, diagnose, prevent, and/or delay the onset of the disease, disorder, and/or condition.

[0189] Transcription factor: As used herein, the term “transcription factor” refers to a DNA-binding protein that regulates transcription of DNA into RNA, for example, by activation or repression of transcription. Some transcription factors effect regulation of transcription alone, while others act in concert with other proteins. Some transcription factor can both activate and repress transcription under certain conditions. In general, transcription factors bind a specific target sequence or sequences highly similar to a specific consensus sequence in a regulatory region of a target gene. Transcription factors may regulate transcription of a target gene alone or in a complex with other molecules.

[0190] Treating: As used herein, the term “treating” refers to partially or completely alleviating, ameliorating, improving, relieving, delaying onset of, inhibiting progression of, reducing severity of, and/or reducing incidence of one or more symptoms features or clinical manifestations of a particular disease, disorder, and/or condition. For example, “treating” cancer may refer to inhibiting survival, growth, and/or spread of a tumor. Treatment may be administered to a subject who does not exhibit signs of a disease, disorder, and/or condition and/or to a subject who exhibits only early signs of a disease, disorder, and/or condition for the purpose of decreasing the risk of developing pathology associated with the disease, disorder, and/or condition.

[0191] Unmodified: As used herein, “unmodified” refers to the protein or agent prior to being modified.

### Equivalents and Scope

[0192] Those skilled in the art will recognize, or be able to ascertain using no more than routine experimentation, many equivalents to the specific embodiments, described herein. The scope of the present invention is not intended to be limited to the above Description, but rather is as set forth in the appended claims.

[0193] Those skilled in the art will recognize, or be able to ascertain using no more than routine experimentation, many equivalents to the specific embodiments in accordance with the invention described herein. The scope of the present invention is not intended to be limited to the above Description, but rather is as set forth in the appended claims.

[0194] In the claims articles such as “a,” “an,” and “the” may mean one or more than one unless indicated to the contrary or otherwise evident from the context. Claims or descriptions that include “or” between one or more members of a group are considered satisfied if one, more than one, or all of the group members are present in, employed in, or otherwise relevant to a given product or process unless indicated to the contrary or otherwise evident from the context. The invention includes embodiments in which exactly one member of the group is present in, employed in, or otherwise relevant to a given product or process. The invention includes embodiments in which more than one, or all of the group members are present in, employed in, or otherwise relevant to a given product or process. Furthermore, it is to be understood that the invention encompasses all variations, combinations, and permutations in which one or more limitations, elements, clauses, descriptive terms, etc., from one or more of the listed claims is introduced into another claim. For example, any claim that is dependent on another claim can be modified to include one or more limitations found in any other claim that is dependent on the same base claim. Furthermore, where the claims recite a composition, it is to be understood that methods of using the composition for any of the purposes disclosed herein are included, and methods of making the composition according to any of the methods of making disclosed herein or other methods known in the art are included, unless otherwise indicated or unless it would be evident to one of ordinary skill in the art that a contradiction or inconsistency would arise.

[0195] Where elements are presented as lists, e.g., in Markush group format, it is to be understood that each subgroup of the elements is also disclosed, and any element(s) can be removed from the group. It should it be understood that, in general, where the invention, or aspects of the invention, is/are referred to as comprising particular elements, features, etc., certain embodiments of the invention or aspects of the invention consist, or consist essentially of, such elements, features, etc. For purposes of simplicity those embodiments have not been specifically set forth in haec verba herein. It is also noted that the term “comprising” is intended to be open and permits the inclusion of additional elements or steps.

[0196] Where ranges are given, endpoints are included. Furthermore, it is to be understood that unless otherwise indicated or otherwise evident from the context and understanding of one of ordinary skill in the art, values that are expressed as ranges can assume any specific value or subrange within the stated ranges in different embodiments of the invention, to the tenth of the unit of the lower limit of the range, unless the context clearly dictates otherwise.

[0197] In addition, it is to be understood that any particular embodiment of the present invention that falls within the prior art may be explicitly excluded from any one or more of the claims. Since such embodiments are deemed to be known to one of ordinary skill in the art, they may be excluded even if the exclusion is not set forth explicitly herein. Any particular embodiment of the compositions of the invention (e.g., any nucleic acid or protein encoded thereby; any method of production; any method of use; etc.) can be excluded from any one or more claims, for any reason, whether or not related to the existence of prior art.

[0198] All cited sources, for example, references, publications, databases, database entries, and art cited herein, are incorporated into this application by reference, even if not expressly stated in the citation. In case of conflicting statements of a cited source and the instant application, the statement in the instant application shall control.

### EXAMPLES

[0199] Modified mRNAs (mmRNAs) according to the invention can be made using standard laboratory methods and materials. The open reading frame (ORF) of the gene of interest is flanked by a 5′ untranslated region (UTR) containing a strong Kozak translational initiation signal and a 3′ UTR (e.g., an alpha-globin 3′ UTR) terminating with an oligo(dT) sequence for templated addition of a polyA tail. The mmRNAs can be modified with pseudouridine (ψ) and 5-methyl-cytidine (5meC) to reduce the cellular innate immune response. Kariko K et al. Immunity 23:165-75 (2005), Kariko K et al. Mol Ther 16:1833-40 (2008), Anderson B R et al. NAR (2010).

[0200] The cloning, gene synthesis and vector sequencing can be performed by DNA2.0 Inc. (Menlo Park, Calif.). The ORFs can be restriction digested and used for cDNA synthesis using tailed-PCR. This tailed-PCR cDNA product can be used as the template for the modified mRNA synthesis reaction using 25 mM each modified nucleotide mix (modified U/C was manufactured by TriLink Biotech, San Diego, Calif., unmodifed A/G was purchased from Epicenter Biotechnologies, Madison, Wis.) and CellScript MegaScript™ (Epicenter Biotechnologies, Madison, Wis.) complete mRNA synthesis kit. The in vitro transcription reaction can be run for 3-4 hours at 37° C. PCR reaction can use HiFi PCR 2× Master Mix™ (Kapa Biosystems, Woburn, Mass.). The in vitro transcribed mRNA product can be run on an agarose gel and visualized. mRNA can be purified with Ambion/Applied Biosystems (Austin, Tex.) MEGAClear RNA™ purification kit. PCR reaction can be purified using PureLink™ PCR purification kit (Invitrogen, Carlsbad, Calif.) or PCR cleanup kit (Qiagen, Valencia, Calif.). The product can be quantified on Nanodrop™ UV Absorbance (ThermoFisher, Waltham, Mass.). Quality, UV absorbance quality and visualization of the product can be performed on a 1.2% agarose gel. The product can be resuspended in TE buffer.

[0201] When transfected into mammalian cells, the modified mRNAs may have a stability of between 12-18 hours.

[0202] For animal experiments, the IV delivery solution can be 150 mM NaCl, 2 mM CaCl2, 2 mM Na+-phosphate, and 0.5 mM EDTA, pH 6.5 and 100 lipofectamine (RNAiMax™, Invitrogen, Carlsbad, Calif.).

### Example 1

### Use of Synthetic Modified mRNAs to Produce Functional Anti-Microbial Peptides and Proteins by Human Cells

[0203] The goal of this example is to express several functional anti-microbial polypeptides (AMPs) (e.g., anti-viral polypeptides) from modified RNA in several human cell lines to test antimicrobial effect of AMPs with distinct patterns of natural distribution and activities.

[0204] Each AMP (hBD-2, LL-37, or RNAse-7) is cloned into propagation plasmid in connection with sequences required for efficient translation and prolonged life of mRNA in cell with globin 5′ and 3′ UTRs and polyA tail. The mRNAs containing modified nucleotides and/or backbone modifications are transcribed using a standard T7 RNA polymerase-dependent transcription system from plasmid templates. Those mRNAs are transfected into a panel of primary human cell lines including keratinocytes and fibroblasts using a lipophilic carrier. The intensive optimization of expression is performed in matrix-type experiments focusing on dose, media and delivery reagents selection. Then a dose titration curve of AMP expression can be established in a repeat administration protocol. As a positive transfection control, each construct encodes the EGFP gene for visualization. The expressed and secreted polypeptides are detected by corresponded antibodies by ELISA and Western blots. The specific antimicrobial activity is tested in corresponded microbiological plate assays or neutralization assays required for the selection of targeted microorganisms. The strain collection can be tested for sensitivity to AMPs by determining their minimal inhibitory concentration (MIC) using those methods. Apoptosis is monitored using FACS with Annexin VCy5.5 and DAPI staining Apoptotic DNA fragmentation can also be observed by agarose gel electrophoresis. Interferon production is assayed from the cell supernatant using standard ELISA techniques and qPCR of inflammatory gene products. Experiments can be carried out with a collection of different viral pathogens of different origins (food processing environment, food products, and human clinical isolates).

### Example 2

### The Modified mRNA Technology as a Tool for Developing Novel Antibiotic Activity

[0205] The goal of this example is to develop efficient protocol for discovery, validation and development of new AMPs (e.g., AVPs).

[0206] The AMP validation protocol in high throughput manner can be developed. There have been many new AMPs recently discovered, but their mechanisms of action and utility for therapeutic applications remain unknown. Modified RNA technology allows for the simultaneous testing of new AMPs for human cell toxicity and antimicrobial activities. The sequence of newly discovered candidates can be cloned for in vitro RNA synthesis and testing in high throughput screens without actual peptide expression. Following by the optimal protocol for modified mRNA transfection, several new AMPs expressed in human cells against a panel of microorganisms can be tested. The AMP improvement protocol can be developed. 2-3 known AMPs are selected and a systematic walkthrough mutagenesis by PCR and clone resulting constructs in plasmid vectors are performed. The library of those mutants can be tested one-by-one in a high throughput screen according to developed protocols in comparison to wild type peptides. Functional domains in testing proteins and peptides associated with human cytotoxicity and domains linked to certain mechanisms of antimicrobial activities can be identified. The results of those scanning efforts can allow engineering AMPs with optimal non-toxic but rapid bacteriostatic activities.

### Example 3

### The Effect of Synthetic Modified mRNAs Coding Intracellular Communication Factors on the Expression of AMPs in Human Cells

[0207] The goal of this example is to use modified mRNAs coding intracellular communication factors to induce innate immune system including expression of AMPs (e.g., AVPs).

[0208] The expression of AMP genes in a variety of epithelial cells can be enhanced using specific nutrients, vitamins (D) and other short chain fatty acids as therapeutic treatment. The opportunity for more specific signal for expression of AMP can be investigated. hBD-2 messenger RNA expression in foreskin-derived keratinocytes was greatly up-regulated with TNF-α within 1 h of stimulation and persisted for more than 48 h. The TNF-α gene can be used for synthesis of modified mRNA and transfected into a panel of primary human cell lines including keratinocytes and fibroblasts using a lipophilic carrier. It can be used to test expression of several AMPs including hBD-2 in human cells. The expressed TNF-α and secreted AMPs can be detected by corresponded antibodies by ELISA and Western blots. The specific anti-microbial activity can be tested in corresponded microbiological plate assays or anti-microbial neutralization assays required for the selection of targeted microorganisms. Apoptosis can be monitored using FACS with Annexin VCy5.5 and DAPI staining Apoptotic DNA fragmentation can also be observed by agarose gel electrophoresis. Interferon production can be assayed from the cell supernatant using standard ELISA techniques and qPCR of inflammatory gene products.

### Example 4

### Use of Synthetic Modified mRNAs to Produce Functional Antimicrobial Peptides and Proteins by Animal Cells for Development of Antibiotics for Agriculture Industry

[0209] The goal of this example is to express several functional AMPs (e.g., AVPs) from modified RNA in several animal cell lines to test antimicrobial effect of AMPs with distinct patterns of natural distribution and activities to test possibility to use modified RNAs as antibiotics in agriculture.

[0210] Each AMP (hBD-2, LL-37, and RNAse-7) can be cloned into propagation plasmid in connection with sequences required for efficient translation and prolonged life of mRNA in cell with globin 5′ and 3′ UTRs and polyA tail. The mRNAs containing modified nucleotides and/or backbone modifications can be transcribed using a standard T7 RNA polymerase-dependent transcription system from plasmid templates. Those mRNAs are transfected into a panel of primary human cell lines including keratinocytes and fibroblasts using a lipophilic carrier. The intensive optimization of expression can be performed in matrix-type experiments focusing on dose, media and delivery reagents selection. A dose titration curve of AMP expression can be established in a repeat administration protocol. As a positive transfection control, each construct encodes the EGFP gene for visualization. The expressed and secreted polypeptides can be detected by corresponded antibodies by ELISA and Western blots. The specific antimicrobial activity can be tested in corresponded microbiological plate assays or antimicrobial neutralization assays required for the selection of targeted microorganisms. Apoptosis is monitored using FACS with Annexin VCy5.5 and DAPI staining Apoptotic DNA fragmentation can also be observed by agarose gel electrophoresis. Interferon production can be assayed from the cell supernatant using standard ELISA techniques and qPCR of inflammatory gene products.

### Example 5

### In Vitro Selection of Anti-Viral Inhibitory Peptides Encoded by Synthetic Modified mRNA

[0211] The viral lifecycle may be inhibited by antibody mimetic anti-viral peptides at a number of points. Viral entry into the host cell can be prevented by inhibitory peptides that ameliorate the proper folding of the viral hairpin fusion complex. Alternatively, intracellular viral propagation may be inhibited by antiviral peptides directed against viral capsid assembly thereby preventing the formation of functional infectious viral particles. The goal of this example is to identify anti-viral peptides using mRNA-display technology directed against specific viral capsid proteins or viral envelope proteins from HIV, herpes or influenza viruses. The mRNA display in vitro selection can be performed similar to previously described methods (Wilson et al., PNAS USA, 2001, 98(7):375). Briefly, a synthetic oligonucleotide library is constructed containing ˜10¹³ unique sequences in a 30-nt randomized region for selection of a 10aa antiviral peptide. The oligonucleotide library is synthesized containing a 3′-puromycin nucleotide analog used to covently attach the nascent peptide chain to its encoded mRNA during the in vitro translation step in rabbit reticulocyte lysate. A pre-selection round can filter the mRNA peptide-display library over a ligand-free column to remove non-specific binding partners from the pool. The selection rounds can then proceed through passage and incubation over a target viral-protein functionalized selection column followed by a wash through selection buffer (20 mM Tris-HCl, pH7.5; 100 mM NaCl). The bound peptides are eluted with an alkaline elution buffer (0.1M KOH) and the sequence information in the peptide is recovered through RT-PCR of the attached mRNA. Mutagenic PCR may be performed between selection rounds to further optimized binding affinity and peptide stability. Based on previous mRNA-display selections (Wilson et al., PNAS USA, 2001, 98(7):375), this selection is expected to recover high affinity (K_{d}˜50 pM-50 nM) anti-viral peptides after 15-20 rounds of selection. To test in vivo functionality of the anti-viral peptide, synthetic modified mRNAs encoding the anti-viral peptide are transfected into target cells. Post-transfection culture transduction with infectious virus or mock-virus are performed and viral propagation can be monitored through standard pfu counts and qPCR of viral genomic material. Cells transfected with synthetic mRNAs encoding the appropriate anti-viral peptide inhibitor are expected to reduce viral propagation, display reduced pfu counts, reduced viral RNA or DNA in culture, and increase cell survival. In vivo efficacy, PK and toxicology can be studied in appropriate animal models.

### LENGTHY TABLE

[0212] The patent application contains a lengthy table section. A copy of the table is available in electronic form from the USPTO web site. An electronic copy of the table will also be available from the USPTO upon request and payment of the fee set forth in 37 CFR 1.19(b)(3).

The application's sequence listing, which the Patent Office published only in electronic form, follows.

SEQUENCE LISTING (1762 sequences)

SEQ ID NO: 1 - protein, 15 aa, Agrocybe cylindracea
ANDPQCLYGNVAAKF

SEQ ID NO: 2 - protein, 13 aa, Calliphora vicina
HGVSGHGQHGVHG

SEQ ID NO: 3 - protein, 20 aa, Basella alba
GADFQECMKEHSQKQHQHQG

SEQ ID NO: 4 - protein, 37 aa, Homo sapiens
LLGDFFRKSKEKIGKEFKRIVQRIKDFLRNLVPRTES

SEQ ID NO: 5 - protein, 10 aa, Cocos nucifera
EQCREEEDDR

SEQ ID NO: 6 - protein, 43 aa, Anemonia sulcata
AAPCFCSGKPGRGDLWILRGTCPGGYGYTSNCYKWPNICCYPH

SEQ ID NO: 7 - protein, 20 aa, Pleurotus citrinopileatus
VYINKLTPPCGTMYYACEAV

SEQ ID NO: 8 - protein, 7 aa, Allium cepa
  Allium cepa var. aggregatum
YQCGQGG

SEQ ID NO: 9 - protein, 16 aa, Basella alba
KIMAKPSKFYEQLRGR

SEQ ID NO: 10 - protein, 25 aa, Litoria splendida
GLLSVLGSVAKHVLPHVVPVIAEHL

SEQ ID NO: 11 - protein, 25 aa, Litoria gilleni
GLLSVLGSVAKHVLPHVVPVIAEHL

SEQ ID NO: 12 - protein, 55 aa, Cicada flammata
NEYHGFVDKANNENKRKKQQGRDDFVVKPNNFANRRRKDDYNENYYDDVDAADVV

SEQ ID NO: 13 - protein, 30 aa, Chassalia parviflora
CGESCVFIPCITSVAGCSCKSKVCYRNGIP

SEQ ID NO: 14 - protein, 30 aa, Chassalia parviflora
KIPCGESCVWIPCVTSIFNCKCENKVCYHD

SEQ ID NO: 15 - protein, 30 aa, Chassalia parviflora
KIPCGESCVWIPCLTSVFNCKCENKVCYHD

SEQ ID NO: 16 - protein, 29 aa, Chassalia parviflora
AIPCGESCVWIPCISAAIGCSCKNKVCYR

SEQ ID NO: 17 - protein, 10 aa, Phaseolus coccineus
KQTENLADTY

SEQ ID NO: 18 - protein, 33 aa, Oryctolagus cuniculus
VVCACRRALCLPRERRAGFCRIRGRIHPLCCRR

SEQ ID NO: 19 - protein, 33 aa, Oryctolagus cuniculus
VVCACRRALCLPLERRAGFCRIRGRIHPLCCRR

SEQ ID NO: 20 - protein, 34 aa, Oryctolagus cuniculus
GICACRRRFCLNFEQFSGYCRVNGARYVRCCSRR

SEQ ID NO: 21 - protein, 33 aa, Viola yezoensis
GGTIFDCGETCFLGTCYTPGCSCGNYGFCYGTN

SEQ ID NO: 22 - protein, 30 aa, Viola yezoensis
GVPCGESCVFIPCITGVIGCSCSSNVCYLN

SEQ ID NO: 23 - protein, 30 aa, Viola yezoensis
GIPCAESCVWIPCTVTALVGCSCSDKVCYN

SEQ ID NO: 24 - protein, 31 aa, Leonia cymosa
GVIPCGESCVFIPCISAAIGCSCKNKVCYRN

SEQ ID NO: 25 - protein, 28 aa, Leonia cymosa
GTACGESCYVLPCFTVGCTCTSSQCFKN

SEQ ID NO: 26 - protein, 30 aa, Leonia cymosa
GIPCGESCVFIPCLTTVAGCSCKNKVCYRN

SEQ ID NO: 27 - protein, 30 aa, Leonia cymosa
GFPCGESCVFIPCISAAIGCSCKNKVCYRN

SEQ ID NO: 28 - protein, 30 aa, Phyllomedusa sauvagii
ALWKNMLKGIGKLAGKAALGAVKKLVGAES

SEQ ID NO: 29 - protein, 27 aa, Phyllomedusa sauvagii
ALWMTLLKKVLKAAAKALNAVLVGANA

SEQ ID NO: 30 - protein, 36 aa, Human immunodeficiency virus
YTSLIHSLIEESQNQQEKNEQELLELDKWASLWNWF

SEQ ID NO: 31 - protein, 40 aa, Ginkgo biloba
ANTAFVSSAHNTQKIPAGAPFNRNLRAMLADLRQNAAFAG

SEQ ID NO: 32 - protein, 10 aa, Gymnocladus chinensis
KTCENLADDY

SEQ ID NO: 33 - protein, 32 aa, Homo sapiens
ATCYCRTGRCATRESLSGVCEISGRLYRLCCR

SEQ ID NO: 34 - protein, 31 aa, Oldenlandia affinis
GSVLNCGETCLLGTCYTTGCTCNKYRVCTKD

SEQ ID NO: 35 - protein, 27 aa, Bombina maxima
GIGTKILGGVKTALKGALKELASTYAN

SEQ ID NO: 36 - protein, 27 aa, Bombina maxima
GIGGKILSGLKTALKGAAKELASTYLH

SEQ ID NO: 37 - protein, 27 aa, Bombina maxima
GIGGVLLSAGKAALKGLAKVLAEKYAN

SEQ ID NO: 38 - protein, 27 aa, Bombina maxima
SIGAKILGGVKTFFKGALKELASTYLQ

SEQ ID NO: 39 - protein, 26 aa, Apis mellifera
GIGAVLKVLTTGLPALISWIKRKRQQ

SEQ ID NO: 40 - protein, 34 aa, Mytilus edulis
SCASRCKGHCRARRCGYYVSVLYRGRCYCKCLRC

SEQ ID NO: 41 - protein, 29 aa, Rattus norvegicus
CSCRTSSCRFGERLSGACRLNGRIYRLCC

SEQ ID NO: 42 - protein, 31 aa, Rattus norvegicus
ACYCRIGACVSGERLTGACGLNGRIYRLCCR

SEQ ID NO: 43 - protein, 31 aa, Cavia porcellus
RRCICTTRTCRFPYRRLGTCIFQNRVYTFCC

SEQ ID NO: 44 - protein, 31 aa, Cavia porcellus
RRCICTTRTCRFPYRRLGTCLFQNRVYTFCC

SEQ ID NO: 45 - protein, 30 aa, Homo sapiens
DCYCRIPACIAGERRYGTCIYQGRLWAFCC

SEQ ID NO: 46 - protein, 30 aa, Pan troglodytes
ACYCRIPACLAGERRYGTCIYQGRLWAFCC

SEQ ID NO: 47 - protein, 37 aa, Palicourea condensata
GDPTFCGETCRVIPVCTYSAALGCTCDDRSDGLCKRN

SEQ ID NO: 48 - protein, 36 aa, Caretta caretta
EKKCPGRCTLKCGKHERPTLPYNCGKYICCVPVKVK

SEQ ID NO: 49 - protein, 18 aa, Macaca mulatta
GFCRCICTRGFCRCICTR

SEQ ID NO: 50 - protein, 128 aa, Homo sapiens
KPKGMTSSQWFKIQHMQPSPQACNSAMKNINKHTKRCKDLNTFLHEPFSSVAATCQTPKIACKNGDKNCHQSHGAVSLTMCKLTSGKHPNCRYKEKRQNKSYVVACKPPQKKDSQQFHLVPVHLDRVL

SEQ ID NO: 51 - protein, 21 aa, Actinomycete Sp9440
CLGIGSCNDFAGCGYAVVCFW

SEQ ID NO: 52 - protein, 33 aa, Unknown
  Description of Unknown: Anti-viral polypeptide
AVSKVLHLEGEVNKIALLSTNKAVVSLSNGVSV

SEQ ID NO: 53 - protein, 33 aa, Unknown
  Description of Unknown: Anti-viral polypeptide
SKVLHLEGEVNKIALLSTNKAVVSLSNGVSVLT

SEQ ID NO: 54 - protein, 33 aa, Unknown
  Description of Unknown: Anti-viral polypeptide
KVLHLEGEVNKIALLSTNKAVVSLSNGVSVLTS

SEQ ID NO: 55 - protein, 33 aa, Unknown
  Description of Unknown: Anti-viral polypeptide
LEGEVNKIALLSTNKAVVSLSNGVSVLTSKVLD

SEQ ID NO: 56 - protein, 33 aa, Unknown
  Description of Unknown: Anti-viral polypeptide
GEVNKIALLSTNKAVVSLSNGVSVLTSKVLDLK

SEQ ID NO: 57 - protein, 33 aa, Unknown
  Description of Unknown: Anti-viral polypeptide
EVNKIALLSTNKAVVSLSNGVSVLTSKVLDLKN

SEQ ID NO: 58 - protein, 33 aa, Unknown
  Description of Unknown: Anti-viral polypeptide
VNKIALLSTNKAVVSLSNGVSVLTSKVLDLKNY

SEQ ID NO: 59 - protein, 33 aa, Unknown
  Description of Unknown: Anti-viral polypeptide
NKIALLSTNKAVVSLSNGVSVLTSKVLDLKNYI

SEQ ID NO: 60 - protein, 33 aa, Unknown
  Description of Unknown: Anti-viral polypeptide
KIALLSTNKAVVSLSNGVSVLTSKVLDLKNYID

SEQ ID NO: 61 - protein, 33 aa, Unknown
  Description of Unknown: Anti-viral polypeptide
IALLSTNKAVVSLSNGVSVLTSKVLDLKNYIDK

SEQ ID NO: 62 - protein, 33 aa, Unknown
  Description of Unknown: Anti-viral polypeptide
ALLSTNKAVVSLSNGVSVLTSKVLDLKNYIDKQ

SEQ ID NO: 63 - protein, 35 aa, Unknown
  Description of Unknown: Anti-viral polypeptide
TLNNSVALDPIDISIELNKAKSDLEESKEWIRRSN

SEQ ID NO: 64 - protein, 35 aa, Unknown
  Description of Unknown: Anti-viral polypeptide
LNNSVALDPIDISIELNKAKSDLEESKEWIRRSNQ

SEQ ID NO: 65 - protein, 35 aa, Unknown
  Description of Unknown: Anti-viral polypeptide
NNSVALDPIDISIELNKAKSDLEESKEWIRRSNQK

SEQ ID NO: 66 - protein, 35 aa, Unknown
  Description of Unknown: Anti-viral polypeptide
NSVALDPIDISIELNKAKSDLEESKEWIRRSNQKL

SEQ ID NO: 67 - protein, 35 aa, Unknown
  Description of Unknown: Anti-viral polypeptide
SVALDPIDISIELNKAKSDLEESKEWIRRSNQKLD

SEQ ID NO: 68 - protein, 35 aa, Unknown
  Description of Unknown: Anti-viral polypeptide
VALDPIDISIELNKAKSDLEESKEWIRRSNQKLDS

SEQ ID NO: 69 - protein, 35 aa, Unknown
  Description of Unknown: Anti-viral polypeptide
ALDPIDISIELNKAKSDLEESKEWIRRSNQKLDSI

SEQ ID NO: 70 - protein, 35 aa, Unknown
  Description of Unknown: Anti-viral polypeptide
LDPIDISIELNKAKSDLEESKEWIRRSNQKLDSIG

SEQ ID NO: 71 - protein, 35 aa, Unknown
  Description of Unknown: Anti-viral polypeptide
DPIDISIELNKAKSDLEESKEWIRRSNQKLDSIGN

SEQ ID NO: 72 - protein, 35 aa, Unknown
  Description of Unknown: Anti-viral polypeptide
PIDISIELNKAKSDLEESKEWIRRSNQKLDSIGNW

SEQ ID NO: 73 - protein, 35 aa, Unknown
  Description of Unknown: Anti-viral polypeptide
IDISIELNKAKSDLEESKEWIRRSNQKLDSIGNWH

SEQ ID NO: 74 - protein, 35 aa, Unknown
  Description of Unknown: Anti-viral polypeptide
DISIELNKAKSDLEESKEWIRRSNQKLDSIGNWHQ

SEQ ID NO: 75 - protein, 35 aa, Unknown
  Description of Unknown: Anti-viral polypeptide
ISIELNKAKSDLEESKEWIRRSNQKLDSIGNWHQS

SEQ ID NO: 76 - protein, 35 aa, Unknown
  Description of Unknown: Anti-viral polypeptide
SIELNKAKSDLEESKEWIRRSNQKLDSIGNWHQSS

SEQ ID NO: 77 - protein, 35 aa, Unknown
  Description of Unknown: Anti-viral polypeptide
IELNKAKSDLEESKEWIRRSNQKLDSIGNWHQSST

SEQ ID NO: 78 - protein, 35 aa, Unknown
  Description of Unknown: Anti-viral polypeptide
ELNKAKSDLEESKEWIRRSNQKLDSIGNWHQSSTT

SEQ ID NO: 79 - protein, 35 aa, Unknown
  Description of Unknown: Anti-viral polypeptide
TAAVALVEAKQARSDIEKLKEAIRDTNKAVQSVQS

SEQ ID NO: 80 - protein, 35 aa, Unknown
  Description of Unknown: Anti-viral polypeptide
AVALVEAKQARSDIEKLKEAIRDTNKAVQSVQSSI

SEQ ID NO: 81 - protein, 35 aa, Unknown
  Description of Unknown: Anti-viral polypeptide
LVEAKQARSDIEKLKEAIRDTNKAVQSVQSSIGNL

SEQ ID NO: 82 - protein, 35 aa, Unknown
  Description of Unknown: Anti-viral polypeptide
VEAKQARSDIEKLKEAIRDTNKAVQSVQSSIGNLI

SEQ ID NO: 83 - protein, 35 aa, Unknown
  Description of Unknown: Anti-viral polypeptide
EAKQARSDIEKLKEAIRDTNKAVQSVQSSIGNLIV

SEQ ID NO: 84 - protein, 35 aa, Unknown
  Description of Unknown: Anti-viral polypeptide
AKQARSDIEKLKEAIRDTNKAVQSVQSSIGNLIVA

SEQ ID NO: 85 - protein, 35 aa, Unknown
  Description of Unknown: Anti-viral polypeptide
KQARSDIEKLKEAIRDTNKAVQSVQSSIGNLIVAI

SEQ ID NO: 86 - protein, 35 aa, Unknown
  Description of Unknown: Anti-viral polypeptide
QARSDIEKLKEAIRDTNKAVQSVQSSIGNLIVAIK

SEQ ID NO: 87 - protein, 35 aa, Unknown
  Description of Unknown: Anti-viral polypeptide
ARSDIEKLKEAIRDTNKAVQSVQSSIGNLIVAIKS

SEQ ID NO: 88 - protein, 35 aa, Unknown
  Description of Unknown: Anti-viral polypeptide
RSDIEKLKEAIRDTNKAVQSVQSSIGNLIVAIKSV

SEQ ID NO: 89 - protein, 35 aa, Unknown
  Description of Unknown: Anti-viral polypeptide
SDIEKLKEAIRDTNKAVQSVQSSIGNLIVAIKSVQ

SEQ ID NO: 90 - protein, 35 aa, Unknown
  Description of Unknown: Anti-viral polypeptide
KLKEAIRDTNKAVQSVQSSIGNLIVAIKSVQDYVN

SEQ ID NO: 91 - protein, 35 aa, Unknown
  Description of Unknown: Anti-viral polypeptide
LKEAIRDTNKAVQSVQSSIGNLIVAIKSVQDYVNK

SEQ ID NO: 92 - protein, 35 aa, Unknown
  Description of Unknown: Anti-viral polypeptide
AIRDTNKAVQSVQSSIGNLIVAIKSVQDYVNKEIV

SEQ ID NO: 93 - protein, 35 aa, Unknown
  Description of Unknown: Anti-viral polypeptide
WQEWERKVDFLEENITALLEEAQIQQEKNMYELQK

SEQ ID NO: 94 - protein, 35 aa, Unknown
  Description of Unknown: Anti-viral polypeptide
QEWERKVDFLEENITALLEEAQIQQEKNMYELQKL

SEQ ID NO: 95 - protein, 35 aa, Unknown
  Description of Unknown: Anti-viral polypeptide
EWERKVDFLEENITALLEEAQIQQEKNMYELQKLN

SEQ ID NO: 96 - protein, 35 aa, Unknown
  Description of Unknown: Anti-viral polypeptide
WERKVDFLEENITALLEEAQIQQEKNMYELQKLNS

SEQ ID NO: 97 - protein, 35 aa, Unknown
  Description of Unknown: Anti-viral polypeptide
ERKVDFLEENITALLEEAQIQQEKNMYELQKLNSW

SEQ ID NO: 98 - protein, 35 aa, Unknown
  Description of Unknown: Anti-viral polypeptide
RKVDFLEENITALLEEAQIQQEKNMYELQKLNSWD

SEQ ID NO: 99 - protein, 35 aa, Unknown
  Description of Unknown: Anti-viral polypeptide
KVDFLEENITALLEEAQIQQEKNMYELQKLNSWDV

SEQ ID NO: 100 - protein, 35 aa, Unknown
  Description of Unknown: Anti-viral polypeptide
VDFLEENITALLEEAQIQQEKNMYELQKLNSWDVF

SEQ ID NO: 101 - protein, 35 aa, Unknown
  Description of Unknown: Anti-viral polypeptide
DFLEENITALLEEAQIQQEKNMYELQKLNSWDVFG

SEQ ID NO: 102 - protein, 35 aa, Unknown
  Description of Unknown: Anti-viral polypeptide
FLEENITALLEEAQIQQEKNMYELQKLNSWDVFGN

SEQ ID NO: 103 - protein, 34 aa, Unknown
  Description of Unknown: Anti-viral polypeptide
LHRIDLGPPISLERLDVGTNLGNAIAKLEAKELL

SEQ ID NO: 104 - protein, 34 aa, Unknown
  Description of Unknown: Anti-viral polypeptide
HRIDLGPPISLERLDVGTNLGNAIAKLEAKELLE

SEQ ID NO: 105 - protein, 34 aa, Unknown
  Description of Unknown: Anti-viral polypeptide
RIDLGPPISLERLDVGTNLGNAIAKLEAKELLES

SEQ ID NO: 106 - protein, 34 aa, Unknown
  Description of Unknown: Anti-viral polypeptide
IDLGPPISLERLDVGTNLGNAIAKLEAKELLESS

SEQ ID NO: 107 - protein, 34 aa, Unknown
  Description of Unknown: Anti-viral polypeptide
DLGPPISLERLDVGTNLGNAIAKLEAKELLESSD

SEQ ID NO: 108 - protein, 34 aa, Unknown
  Description of Unknown: Anti-viral polypeptide
LGPPISLERLDVGTNLGNAIAKLEAKELLESSDQ

SEQ ID NO: 109 - protein, 34 aa, Unknown
  Description of Unknown: Anti-viral polypeptide
GPPISLERLDVGTNLGNAIAKLEAKELLESSDQI

SEQ ID NO: 110 - protein, 34 aa, Unknown
  Description of Unknown: Anti-viral polypeptide
PPISLERLDVGTNLGNAIAKLEAKELLESSDQIL

SEQ ID NO: 111 - protein, 34 aa, Unknown
  Description of Unknown: Anti-viral polypeptide
PISLERLDVGTNLGNAIAKLEAKELLESSDQILR

SEQ ID NO: 112 - protein, 34 aa, Unknown
  Description of Unknown: Anti-viral polypeptide
SLERLDVGTNLGNAIAKLEAKELLESSDQILRSM

SEQ ID NO: 113 - protein, 34 aa, Unknown
  Description of Unknown: Anti-viral polypeptide
LERLDVGTNLGNAIAKLEAKELLESSDQILRSMK

SEQ ID NO: 114 - protein, 10 aa, Vigna unguiculata
  subsp. Sesquipedalis
KTCENLADTY

SEQ ID NO: 115 - protein, 107 aa, Homo sapiens
SGKSFKAGVCPPKKSAQCLRYKKPECQSDWQCPGKKRCCPDTCGIKCLDPVDTPNPTRRKPGKCPVTYGQCLMLNPPNFCEMDGQCKRDLKCCMGMCGKSCVSPVKA

SEQ ID NO: 116 - protein, 15 aa, Castanopsis chinensis
AKITFTNNHPRTIWP

SEQ ID NO: 117 - protein, 20 aa, Actinidia chinensis
ATFNFINNCPFTVWAAAVPG

SEQ ID NO: 118 - protein, 36 aa, Papio anubis
QKYYCRVRGGRCAVLSCLPKEEQIGKCSTRGRKCCR

SEQ ID NO: 119 - protein, 40 aa, Papio anubis
IRNPVTCIRSGAICYPRSCPGSYKQIGVCGVSVIKCCKKP

SEQ ID NO: 120 - protein, 31 aa, Viola hederacea
CGESCAMISFCFTEVIGCSCKNKVCYLNSIS

SEQ ID NO: 121 - protein, 461 aa, Homo sapiens
MWQLTSLLLFVATWGISGTPAPLDSVFSSSERAHQVLRIRKRANSFLEELRHSSLERECIEEICDFEEAKEIFQNVDDTLAFWSKHVDGDQCLVLPLEHPCASLCCGHGTCIDGIGSFSCDCRSGWEGRFCQREVSFLNCSLDNGGCTHYCLEEVGWRRCSCAPGYKLGDDLLQCHPAVKFPCGRPWKRMEKKRSHLKRDTEDQEDQVDPRLIDGKMTRRGDSPWQVVLLDSKKKLACGAVLIHPSWVLTAAHCMDESKKLLVRLGEYDLRRWEKWELDLDIKEVFVHPNYSKSTTDNDIALLHLAQPATLSQTIVPICLPDSGLAERELNQAGQETLVTGWGYHSSREKEAKRNRTFVLNFIKIPVVPHNECSEVMSNMVSENMLCAGILGDRQDACEGDSGGPMVASFHGTWFLVGLVSWGEGCGLLHNYGVYTKVSRYLDWIHGHIRDKEAPQKSWAP

SEQ ID NO: 122 - protein, 36 aa, Mus musculus
DSIQCFQKNNTCHTNQCPYFQDEIGTCYDRRGKCCQ

SEQ ID NO: 123 - protein, 36 aa, Bos taurus
NPVSCVRNKGICVPIRCPGSMKQIGTCVGRAVKCCR

SEQ ID NO: 124 - protein, 84 aa, Carcinus maenas
NKDCKYWCKDNLGLNYCCGQPGVTYPPFTKKHLGRCPAVRDTCTGVRTQLPTYCPHDGACQFRSKCCYDTCLKHHVCKTAEYPY

SEQ ID NO: 125 - protein, 117 aa, Oryctolagus cuniculus
IPRRRLRYEEVVAQALQFYNEGQQGQPLFRLLEATPPPSLNSKSRIPLNFRIKETVCIFTLDRQPGNCAFREGGEERICRGAFVRRRWVRALTLRCDRDQRRQPEFPRVTRPAGPTA

SEQ ID NO: 126 - protein, 117 aa, Oryctolagus cuniculus
IPHRRLRYEEVVAQALQFYNEGQQGQPLFRLLEATPPPSLNSKSRIPLNFRIKETVCIFTLDRQPGNCAFREGGEERICRGAFVRRRRVRALTLRCDRDQRRQPEFPRVTRPAGPTA

SEQ ID NO: 127 - protein, 19 aa, Cyprinus carpio
GIGGKPVQTAFVDNDGIYD

SEQ ID NO: 128 - protein, 37 aa, Androctonus australis
GFGCPFNQGACHRHCRSIRRRGGYCAGLFKQTCTCYR

SEQ ID NO: 129 - protein, 38 aa, Leiurus quinquestriatus
  Leiurus quinquestriatus hebraeus
GFGCPLNQGACHRHCRSIRRRGGYCAGFFKQTCTCYRN

SEQ ID NO: 130 - protein, 19 aa, Helicobacter pylori
AKKVFKRLEKLFSKIQNDK

SEQ ID NO: 131 - protein, 39 aa, Bombus pascuorum
FVPYNPPRPGQSKPFPSFPGHGPFNPKIQWPYPLPNPGH

SEQ ID NO: 132 - protein, 34 aa, Apis mellifera
YVPLPNVPQPGRRPFPTFPGQGPFNPKIKWPQGY

SEQ ID NO: 133 - protein, 67 aa, Caenorhabditis elegans
DIDFSTCARMDVPILKKAAQGLCITSCSMQNCGTGSCKKRSGRPTCVCYRCANGGGDIPLGALIKRG

SEQ ID NO: 134 - protein, 71 aa, Acalolepta luxuriosa
SLQPGAPNVNNKDQPWQVSPHISRDDSGNTRTDINVQRHGENNDFEAGWSKVVRGPNKAKPTWHIGGTHRW

SEQ ID NO: 135 - protein, 29 aa, Amaranthus caudatus
VGECVRGRCPSGMCCSQFGYCGKGPKYCG

SEQ ID NO: 136 - protein, 30 aa, Amaranthus caudatus
VGECVRGRCPSGMCCSQFGYCGKGPKYCGR

SEQ ID NO: 137 - protein, 132 aa, Acanthoscurria gomesiana
DVYKGGGGGRYGGGRYGGGGGYGGGLGGGGLGGGGLGGGKGLGGGGLGGGGLGGGGLGGGGLGGGKGLGGGGLGGGGLGGGGLGGGGLGGGKGLGGGGLGGGGLGGGRGGGYGGGGGYGGGYGGGYGGGKYK

SEQ ID NO: 138 - protein, 131 aa, Acanthoscurria gomesiana
DVYKGGGGGRYGGGRYGGGGGYGGGLGGGGLGGGGLGGGKGLGGGGLGGGGLGGGGLGGGGLGGGKGLGGGGLGGGGLGGGGLGGGGLGGGKGLGGGGLGGGGLGGGRGGYGGGGYGGGYGGGYGGGKYKG

SEQ ID NO: 139 - protein, 502 aa, Achatina fulica
EGPQCSRSVDVAVVGAGPSGTYSAYKLRNKGQTVELFEYSNRIGGRLFTTHLPNVPDLNLESGGMRYFKNHHKIFGVLVKELNLSNKEFTEGFGKPGRTRFFARGKSLTLEEMTSGDVPYNLSTEEKANQANLAGYYLKKLTGFDGEVLTIPQANKLEVDDGRKLYQLTVDEALDKVGTPEGKEFLKAFSTGNTEFIEGVSAVNYFLVELGEREEEILTLTDGMSALPQALADAFLKSSTSHALTLNRKLQSLSKTDNGLYLLEFLETNTHEGYTEESNITDLVCARKVILAIPQSALIHLDWKPLRSETVNEAFNAVKFIPTSKVFLTFPTAWWLSDAVKNPAFVVKSTSPFNQMYDWKSSNVTGDAAMIASYADTSDTKFQENLNSKGELIPGSAPGANRVTVALKEELLSQLSQAYGIERSDIPEPKSGTSQFWSSYPFEGDWTVWKAGYHCEYTQYIIERPSLIDDVFVVGSDHVNCIENAWTESAFLSVENVFEKYF

SEQ ID NO: 140 - protein, 58 aa, Lactobacillus acidophilus
KTYYGTNGVHCTKKSLWGKVRLKNVIPGTLCRKQSLPIKQDLKILLGWATGAFGKTFH

SEQ ID NO: 141 - protein, 59 aa, Lactobacillus acidophilus
NIYWIADQFGIHLATGTARKLLDAVASGASLGTAFAAILGVTLPAWALAAAGALGATAA

SEQ ID NO: 142 - protein, 108 aa, Streptomyces globisporus
APAFSVSPASGASDGQSVSVSVAAAGETYYIAQCAPVGGQDACNPATATSFTTDASGAASFSFTVRKSYAGQTPSGTPVGSVDCATDACNLGAGNSGLNLGHVALTFG

SEQ ID NO: 143 - protein, 55 aa, Sus scrofa
KQATVGDINTERPGILDLKGKAKWDAWNGLKGTSKEDAMKAYINKVEELKKKYGI

SEQ ID NO: 144 - protein, 33 aa, Phyllomedusa bicolor
GLWSKIKEVGKEAAKAAAKAAGKAALGAVSEAV

SEQ ID NO: 145 - protein, 14 aa, Agelaia pallipes
INWLKLGKAIIDAL

SEQ ID NO: 146 - protein, 10 aa, Allium sativum
DDFLCAGGCL

SEQ ID NO: 147 - protein, 52 aa, Macaca mulatta
MRTLAILAAILLFALLAQAKSLQETADDAATQEQPGEDDQDLAVSFEENGLS

SEQ ID NO: 148 - protein, 62 aa, Lysobacter sp.
  strain XL 1
VNVLGGIEYSINNATLCSVGFSVRVFNYAEGAVRGLTQGNACMGRGDSGGSWFTLFERQYGL

SEQ ID NO: 149 - protein, 24 aa, Amolops loloensis
FLPMLAGLAANFLPKLFCKITKKC

SEQ ID NO: 150 - protein, 24 aa, Amolops loloensis
FLPLAVSLAANFLPKLFCKITKKC

SEQ ID NO: 151 - protein, 24 aa, Amolops loloensis
FLPMLAGLAANLLPKLFCKITKKC

SEQ ID NO: 152 - protein, 24 aa, Amolops loloensis
FLPMLAGLAANFLPELFCKITKKC

SEQ ID NO: 153 - protein, 16 aa, Amolops loloensis
FLPIVGKLLSGLSGLL

SEQ ID NO: 154 - protein, 13 aa, Amolops loloensis
FLPIVGKLLSGLL

SEQ ID NO: 155 - protein, 13 aa, Amolops loloensis
LLPIVGKLLSGLL

SEQ ID NO: 156 - protein, 25 aa, Androctonus australis
RSVCRQIKICRRRGGCYYKCTNRPY

SEQ ID NO: 157 - protein, 34 aa, Drosophila melanogaster
VFIDILDKVENAIHNAAQVGIGFAKPFEKLINPK

SEQ ID NO: 158 - protein, 34 aa, Drosophila mauritiana
VFIDILDKMENAIHKAAQAGIGIAKPIEKMILPK

SEQ ID NO: 159 - protein, 48 aa, Drosophila orena
QSDALFVDIIDNVENAIHKAAKTGIGMVKPIENIFIPNQQKKSTEASN

SEQ ID NO: 160 - protein, 34 aa, Drosophila sechellia
VFIDILDKMENAIHKAAQAGIGLAKPIENMILPK

SEQ ID NO: 161 - protein, 37 aa, Drosophila simulans
VFIDILDKMENAIHKAAQAGIGIAKPIENMILPKLTK

SEQ ID NO: 162 - protein, 40 aa, Drosophila teissieri
FINLLDKVEDALHTGAQAGFKLIRPVERGATPKKSEKPEK

SEQ ID NO: 163 - protein, 34 aa, Drosophila yakuba
IFVDVLDNVETALHNAAKAGFKLIKPIEKLIMPK

SEQ ID NO: 164 - protein, 60 aa, Galleria mellonella
ETESTPDYLKNIQQQLEEYTKNFNTQVQNAFDSDKIKSEVNNFIESLGKILNTEKKEAPK

SEQ ID NO: 165 - protein, 10 aa, Anoplius samariensis
GLLKRIKTLL

SEQ ID NO: 166 - protein, 30 aa, Carcinus maenas
  MOD_RES (1)..(2): Any amino acid
XXVPYPRPFPRPPIGPRPLPFPGGGRPFQS

SEQ ID NO: 167 - protein, 20 aa, Brassica rapa
  subsp. chinensis
PAQPFRFPKHPQGPQTRPPI

SEQ ID NO: 168 - protein, 116 aa, Harmonia axyridis
GTQVTLGHKGVIFENDKHLVSGEGFVSKQFKPTGPTALGGGVSYEYKPSDSGINLSASNTRGAGTDFSALGNANLWKSRDGNTRVDAYANYDRHYGGPWGTGRLNYGGGIQVSHDF

SEQ ID NO: 169 - protein, 26 aa, Streptococcus pyogenes
  serotype M49
GKNGVFKTISHECHLNTWAFLATCCS

SEQ ID NO: 170 - protein, 27 aa, Bos taurus
GRFKRFRKKFKKLFKKLSPVIPLLHLG

SEQ ID NO: 171 - protein, 34 aa, Bos taurus
GLFRRLRDSIRRGQQKILEKARRIGERIKDIFRG

SEQ ID NO: 172 - protein, 65 aa, Plutella xylostella
MKLSNIFFFVFMAFFAVASVSAAPRWKPFKKLEKVGRNIRDGIIKAGPAVAVIGQATSIARPTGK

SEQ ID NO: 173 - protein, 23 aa, Sus scrofa
RIIDLLWRVRRPQKPKFVTVWVR

SEQ ID NO: 174 - protein, 36 aa, Sus scrofa
GRFRRLRKKTRKRLKKIGKVLKWIPPIVGSIPLGCG

SEQ ID NO: 175 - protein, 37 aa, Sus scrofa
GLLSRLRDFLSDRGRRLGEKIERIGQKIKDLSEFFQS

SEQ ID NO: 176 - protein, 23 aa, Artificial Sequence
  Description of Artificial Sequence: Synthetic Anti-viral polypeptide
FALALKALKKALKKLKKALKKAL

SEQ ID NO: 177 - protein, 120 aa, Antheraea mylitta
KRFTRCGLVNELRKQGFDENLMRDWVCLVENESARYTDKIANVNKNGSRDYGLFQINDKYWCSKGSTPGKDCNVTCSQLLTDDITVASTCAKKIYKRTKFDAWSGWDNHCNHSNPDISSC

SEQ ID NO: 178 - protein, 44 aa, Staphylococcus haemolyticus
MQKLAEAIAAAVQAGQDKDWGKMGTSIVGIVENGISVLGKIFGF

SEQ ID NO: 179 - protein, 44 aa, Staphylococcus haemolyticus
MEKIANAVKSAIEAGQNQDWTKLGTSILDIVSNGVTELSKIFGF

SEQ ID NO: 180 - protein, 44 aa, Staphylococcus haemolyticus; identical to SEQ ID NO: 179

SEQ ID NO: 181 - protein, 44 aa, Staphylococcus haemolyticus
MSKLVQAISDAVQAQQNQDWAKLGTSIVGIVENGVGILGKLFGF

SEQ ID NO: 182 - protein, 44 aa, Staphylococcus haemolyticus
MSKLVQAISDAVQAGQNQDWAKLGTSIVGIVENGVGILGKLFGF

SEQ ID NO: 183 - protein, 37 aa, Saguinus oedipus
RLGGILRKAGEKIGGGLKKIGQKIKDFFGKLAPRTES

SEQ ID NO: 184 - protein, 37 aa, Trachypithecus obscurus
RLGNFFRKAKKKIGRGLKKIGQKIKDFLGNLVPRTES

SEQ ID NO: 185 - protein, 37 aa, Trachypithecus cristatus
RLGNFFRKAKEKIGRGLKKIGQKIKDFWGNLVPRTES

SEQ ID NO: 186 - protein, 37 aa, Pongo pygmaeus
LLGDFFRKAREKIGEEFKRIVQRIKDFLRNLVPRTES

SEQ ID NO: 187 - protein, 37 aa, Papio papio
RLGNFFRKVKEKIGGGLKKVGQKIKDFLGNLVPRTAS

SEQ ID NO: 188 - protein, 37 aa, Pan troglodytes; identical to SEQ ID NO: 4

SEQ ID NO: 189 - protein, 37 aa, Nomascus gabriellae
LPGNFFRKAREKIGKEFKRIVQRIKDFLQHLVPRTEA

SEQ ID NO: 190 - protein, 37 aa, Macaca tonkeana; identical to SEQ ID NO: 187

SEQ ID NO: 191 - protein, 37 aa, Macaca fascicularis; identical to SEQ ID NO: 187

SEQ ID NO: 192 - protein, 37 aa, Hylobates moloch
SLGNFFRKARKKIGEEFKRIVQRIKDFLQHLIPRTEA

SEQ ID NO: 193 - protein, 37 aa, Nomascus leucogenys
LLGNFFRKAREKIGKEFKRIVQRIKDFLQHLVPRTEA

SEQ ID NO: 194 - protein, 37 aa, Nomascus concolor; identical to SEQ ID NO: 189

SEQ ID NO: 195 - protein, 37 aa, Gorilla gorilla
  Gorilla gorilla gorilla
LLGDFFRKAKEKIGKESKRIVQRIKDFLRNLVPRTES

SEQ ID NO: 196 - protein, 37 aa, Chlorocebus aethiops
RLGKFFRKVKKKIGGGLKKIGQKIKDFLGNLVPRTAS

SEQ ID NO: 197 - protein, 37 aa, Cebus capucinus
RLGGFLQKAREKIARGFKKIGQKINDFLGKLAPRTEA

SEQ ID NO: 198 - protein, 37 aa, Callithrix jacchus
RLGDILQKAREKIEGGLKKLVQKIKDFFGKFAPRTES

SEQ ID NO: 199 - protein, 37 aa, Ateles fusciceps
QLGDVLQKAGEKIVRGLKNIGQRIKDFFGKLTPRTES

SEQ ID NO: 200 - protein, 37 aa, Ateles fusciceps; identical to SEQ ID NO: 199
  Ateles fusciceps robustus

SEQ ID NO: 201 - protein, 39 aa, Sus scrofa
RRRPRPPYLPRPRPPPFFPPRLPPRIPPGFPPRFPPRFP

SEQ ID NO: 202 - protein, 44 aa, Staphylococcus haemolyticus
MQKLAEAIAAAVSAGQDKDWGKMGTSIVGIVENGITVLGKIFGF

SEQ ID NO: 203 - protein, 87 aa, Streptomyces carzinostaticus
AAGNPSETGGAVATYSTAVGSFLDGTVKVVATGGASRVPGNCGTAAVLECDNPESFDGTRAWGDLSADQGTGEDAPPETASLIFAVN

SEQ ID NO: 204 - protein, 14 aa, Planobispora rosea
SCNCVCGFCCSCSP

SEQ ID NO: 205 - protein, 35 aa, Aedes albopictus
GGLKKLGKKLEGVGKRVFKASEKALPVLTGYKAIG

SEQ ID NO: 206 - protein, 35 aa, Aedes albopictus; identical to SEQ ID NO: 205

SEQ ID NO: 207 - protein, 13 aa, Unknown
  Description of Unknown: Anti-viral polypeptide
GLFDKLKSLVSDF

SEQ ID NO: 208 - protein, 13 aa, Unknown
  Description of Unknown: Anti-viral polypeptide
GLFDIVKKLVSDF

SEQ ID NO: 209 - protein, 102 aa, Tachypleus tridentatus
EGGIWTQLALALVKNLATLWQSGDFQFLGHECHYRVNPTVKRLKWKYKGKFWCPSWTSITGRATKSSRSGAVEHSVRDFVSQAKSSGLITEKEAQTFISQYE

SEQ ID NO: 210 - protein, 66 aa, Xenopus laevis
LKCVNLQANGIKMTQECAKEDTKCLTLRSLKKTLKFCASGRTCTTMKIMSLPGEQITCCEGNMCNA

SEQ ID NO: 211 - protein, 23 aa, Artificial Sequence
  Description of Artificial Sequence: Synthetic Anti-viral polypeptide
SNMIEGVFAKGFKKASHLFKGIG

SEQ ID NO: 212 - protein, 16 aa, Artificial Sequence
  Description of Artificial Sequence: Synthetic Anti-viral polypeptide
KGLKKLLKLLKKLLKL

SEQ ID NO: 213 - protein, 17 aa, Artificial Sequence
  Description of Artificial Sequence: Synthetic Anti-viral polypeptide
SNMIEGVFAKGFKKASH

SEQ ID NO: 214 - protein, 17 aa, Artificial Sequence
  Description of Artificial Sequence: Synthetic Anti-viral polypeptide
LKLLKKLLKLLKKLGGK

SEQ ID NO: 215 - protein, 18 aa, Artificial Sequence
  Description of Artificial Sequence: Synthetic Anti-viral polypeptide
LKLLKKLLKLLKKLGGGK

SEQ ID NO: 216 - protein, 16 aa, Artificial Sequence
  Description of Artificial Sequence: Synthetic Anti-viral polypeptide
LKLLKKLLKLLKKLGK

SEQ ID NO: 217 - protein, 12 aa, Phyllomedusa hypochondrialis
LRPAVIVRTKAL

SEQ ID NO: 218 - protein, 38 aa, Mesembryanthemum crystallinum
AKCIKNGKGCREDQGPPFCCSGFCYRQVGWARGYCKNR

SEQ ID NO: 219 - protein, 37 aa, Mirabilis jalapa
QCIGNGGRCNENVGPPYCCSGFCLRQPGQGYGYCKNR

SEQ ID NO: 220 - protein, 27 aa, Xenopus tropicalis
GFLGPLLKLAAKGVAKVIPHLIPSRQQ

SEQ ID NO: 221 - protein, 76 aa, Macadamia integrifolia
SAFTVWSGPGCNNRAERYSKCGCSAIHQKGGYDFSYTGQTAALYNQAGCSGVAHTRFGSSARACNPFGWKSIFIQC

SEQ ID NO: 222 - protein, 38 aa, Phytolacca americana
AGCIKNGGRCNASAGPPYCCSSYCFQIAGQSYGVCKNR

SEQ ID NO: 223 - protein, 36 aa, Mirabilis jalapa
CIGNGGRCNENVGPPYCCSGFCLRQPNQGYGVCRNR

SEQ ID NO: 224 - protein, 25 aa, Xenopus tropicalis
GVWSTVLGGLKKFAKGGLEAIVNPK

SEQ ID NO: 225 - protein, 25 aa, Xenopus tropicalis
GLASTLGSFLGKFAKGGAQAFLQPK

SEQ ID NO: 226 - protein, 22 aa, Xenopus tropicalis
GVFLDALKKFAKGGMNAVLNPK

SEQ ID NO: 227 - protein, 22 aa, Xenopus tropicalis
GMATKAGTALGKVAKAVIGAAL

SEQ ID NO: 228 - protein, 18 aa, Xenopus tropicalis
GFLGSLLKTGLKVGSNLL

SEQ ID NO: 229 - protein, 18 aa, Xenopus tropicalis
GLLGPLLKIAAKVGSNLL

SEQ ID NO: 230 - protein, 76 aa, Bos taurus
QAEESNLQSLVSQYFQTVADYGKDLVEKAKGSELQTQAKAYFEKTQEELTPFFKKAGTDLLNFLSSFIDPKKQPAT

SEQ ID NO: 231 - protein, 34 aa, Gallus gallus
  MOD_RES (30)..(30): Any amino acid
GRKSDCFRKNGFCAFLKCPYLTLISGLCSXFHLC

SEQ ID NO: 232 - protein, 22 aa, Spinacia oleracea
  MOD_RES (1)..(1): Any amino acid
XTCESPSHKFKGPCATNRNCES

SEQ ID NO: 233 - protein, 52 aa, Spinacia oleracea
GIFSSRKCKTPSKTFKGICTRDSNCDTSCRYEGYPAGDCKGIRRRCMCSKPC

SEQ ID NO: 234 - protein, 25 aa, Spinacia oleracea
GIFSSRKCKTVSKTFRGICTRNANC

SEQ ID NO: 235 - protein, 23 aa, Spinacia oleracea
MFFSSKKCKTVSKTFRGPCVRNA

SEQ ID NO: 236 - protein, 24 aa, Spinacia oleracea
  MOD_RES (12)..(12): Any amino acid
MFFSSKKCKTVXKTFRGPCVRNAN

SEQ ID NO: 237 - protein, 77 aa, Sus scrofa
LICESCRKIIQKLEDMVGPQPNEDTVTQAASRVCDKMKILRGVCKKIMRTFLRRISKDILTGKKPQAICVDIKICKE

SEQ ID NO: 238 - protein, 46 aa, Equus caballus
  MOD_RES (13)..(13): Any amino acid
  MOD_RES (24)..(24): Any amino acid
DVQCGEGHFCHDXQTCCRASQGGXACCPYSQGVCCADQRHCCPVGF

SEQ ID NO: 239 - protein, 46 aa, Equus caballus
EVERKHPLGGSRPGRCPTVPPGTFGHCACLCTGDASEPKGQKCCSN

SEQ ID NO: 240 - protein, 47 aa, Bacillus subtilis
AIKLVQSPNGNFAASFVLDGTKWIFKSKYYDSSKGYWVGIYEVWDRK

SEQ ID NO: 241 - protein, 62 aa, Lumbricus rubellus
FSKYERQKDKRPYSERKNQYTGPQFLYPPERIPPQKVIKWNEEGLPIYEIPGEGGHAEPAAA

SEQ ID NO: 242 - protein, 33 aa, Zea mays
RSGRGECRRQCLRRHEGQPWETQECMRRCRRRG

SEQ ID NO: 243 - protein, 78 aa, Sus scrofa
GLICESCRKIIQKLEDMVGPQPNEDTVTQAASRVCDKMKILRGVCKKIMRTFLRRISKDILTGKKPQAICVDIKICKE

SEQ ID NO: 244 - protein, 23 aa, Odorrana grahami
GLLRASSVWGRKYYVDLAGCAKA

SEQ ID NO: 245 - protein, 24 aa, Xenopus laevis
GVLSNVIGYLKKLGTGALNAVLKQ

SEQ ID NO: 246 - protein, 35 aa, Meleagris gallopavo
GKREKCLRRNGFCAFLKCPTLSVISGTCSRFQVCC

SEQ ID NO: 247 - protein, 20 aa, Meleagris gallopavo
LFCKRGTCHFGRCPSHLIKV

SEQ ID NO: 248 - protein, 25 aa, Meleagris gallopavo
LSCKRGTCHFGRCPSHLIKGSCSGG

SEQ ID NO: 249 - protein, 118 aa, Bungarus fasciatus
NLYQFKNMIQCAGTQLCVAYVKYGCYCGPGGTGTPLDQLDRCCQTHDHCYDNAKKFGNCIPYFKTYEYTCNKPDLTCTDAKGSCARNVCDCDRAAAICFAAAPYNLANFGINKETHCQ

SEQ ID NO: 250 - protein, 93 aa, Allium cepa
QNICPRVNRIVTPCVAYGLGRAPIAPCCRALNDLRFVNTRNLRRAACRCLVGVVNRNPGLRRNPRFQNIPRDCRNTFVRPFWWRPRIQCGRIN

SEQ ID NO: 251 - protein, 37 aa, Oryctolagus cuniculus
GLRKRLRKFRNKIKEKLKKIGQKIQGFVPKLAPRTDY

SEQ ID NO: 252 - protein, 20 aa, Oryctolagus cuniculus
GLRKRLRKFRNKIKEKLKKI

SEQ ID NO: 253 - protein, 41 aa, Ipomoea nil
QQCGRQASGRLCGNRLCCSQWGYCGSTASYCGAGCQSQCRS

SEQ ID NO: 254 - protein, 10 aa, Lentinus sajor-caju
DNGEAGRAAR

SEQ ID NO: 255 - protein, 49 aa, Rattus norvegicus
DIPPGIRNTVCFMQRGHCRLFMCRSGERKGDICSDPWNRCCVSSSIKNR

SEQ ID NO: 256 - protein, 17 aa, Bombus pascuorum
GNRPVYIPPPRPPHPRL

SEQ ID NO: 257 - protein, 18 aa, Apis mellifera
GNNRPVYIPQPRPPHPRI

SEQ ID NO: 258 - protein, 18 aa, Apis mellifera
GNNRPVYIPQPRPPHPRL

SEQ ID NO: 259 - protein, 18 aa, Apis mellifera
GNNRPIYIPQPRPPHPRL

SEQ ID NO: 260 - protein, 537 aa, Aplysia kurodai
RRVCESQQSCDDEQCDETLNIAIVGAGPSGAYSAYKMRHSGKDVGLFEYCNRVGGRLYTYQLPNTPDVNLELGGMRYITGAHNILQEVTKELGLKSVLFTEGFGRPGRTRYFLRGQSLTHEEVQSGDVPYNLTTIEKLNQGRIYEYYLKELTGFDIGNGSISREQLLKLRVSDGRLLYQLTFDEALDLVASPEGKEFARDVHVFHTEVTSDANAVSVFDDHLGEDGAGDAILTVEEGMQKVPKELIKEFKKTSASNQVQLNKYLQAIRSKSDHSFVLYFRPTSTVDGKTTILDYRPLQRVCARQVILALPVFALRRLDWPPLHEGRAETAYAAVRNMAASKVFMTFDQAWWLDRNFTDNTAFVTKGDTPFSQMYDWKKSNVSGDYILIASYADGNNTLYQKVLRDQGESINGSEPGANRVSEPLKNNILDHLSEAYGVDRSTIPEPKTAVSQFWTDYPFGCGWITWRAGYHFDDVMSTMRRPSLKDEVYVVGADYSWGLMSSWTEGALETADAVLKDYFKGECAKPPSVDHLDSHMA

SEQ ID NO: 261 - protein, 51 aa, Galleria mellonella
VQETQKLAKTVGANLEETNKKLAPQIKSAYDDFVKQAQEVQKKLHEAASKQ

SEQ ID NO: 262 - protein, 20 aa, Protobothrops flavoviridis
AHDRNPLEEYFRETDYEEFL

SEQ ID NO: 263 - protein, 37 aa, Hyas araneus
SRWPSPGRPRPFPGRPKPIFRPRPCNCYAPPCPCDRW

SEQ ID NO: 264 - protein, 21 aa, Artificial Sequence
  Description of Artificial Sequence: Synthetic Anti-viral polypeptide
RWCVYAYVRVRGVLVRYRRCW

SEQ ID NO: 265 - protein, 23 aa, Ascaphus truei
GFRDVLKGAAKAFVKTVAGHIAN

SEQ ID NO: 266 - protein, 24 aa, Ascaphus truei
GFRDVLKGAAKAFVKTVAGHIANI

SEQ ID NO: 267 - protein, 24 aa, Ascaphus truei
GIKDWIKGAAKKLIKTVASNIANQ

SEQ ID NO: 268 - protein, 24 aa, Ascaphus truei
GFKDWIKGAAKKLIKTVASSIANQ

SEQ ID NO: 269 - protein, 14 aa, Pacifastacus leniusculus
RPRPNYRPRPIYRP

SEQ ID NO: 270 - protein, 188 aa, Bombyx mori
QAGSFTVNSDGTSGAALKVPLTGNDKNVLSAIGSADFNDRHKLSAASAGLALDNVNGHGLSLTGTRIPGFGEQLGVAGKVNLFHNNNHDLSAKAFAIRNSPSAIPNAPNFNTLGGGVDYMFKQKVGASLSAAHSDVINRNDYSAGGKLNLFRSPSSSLDFNAGFKKFDTPFYRSSWEPNVGFSFSKFF

SEQ ID NO: 271 - protein, 192 aa, Trichoplusia ni
QAQGSVTLNSDGSMGLGAKVPIVGNEKNVLSALGSVDLNDQLKPASRGMGLALDNVNGHGLSVMKETVPGFGDRLTGAGRVNVFHNDNHDISAKAFVTKNMPDFPNVPNFNTVGGGVDYMYKNKVGASLGMANTPFLDRKDYSAMGNLNVFRSPTTSVDFNAGFKKFDTPVFKSNWEPNFGLTFSRSFGNKW

SEQ ID NO: 272 - protein, 190 aa, Drosophila melanogaster
QVLGGSLTSNPAGGADARLDLTKGIGNPNHNVVGQVFAAGNTQSGPVTTGGTLAYNNAGHGASLTKTHTPGVKDVFQQEAHANLFNNGRHNLDAKVFASQNKLANGFEFQRNGAGLDYSHINGHGASLTHSNFPGIGQQLGLDGRANLWSSPNRATTLDLTGSASKWTSGPFANQKPNFGAGLGLSHHFG

SEQ ID NO: 273 - protein, 190 aa, Drosophila melanogaster
QVLGGSLASNPAGGADARLNLSKGIGNPNHNVVGQVFAAGNTQSGPVTTGGTLAYNNAGHGASLTKTHTPGVKDVFQQEAHANLFNNGRHNLDAKVFASQNKLANGFEFQRNGAGLDYSHINGHGASLTHSNFPGIGQQLGLDGRANLWSSPNRATTLDLTGSASKWTSGPFANQKPNFGAGLGLSHHFG

SEQ ID NO: 274 - protein, 187 aa, Hyalophora cecropia
QAGALTINSDGTSGAVVKVPITGNENHKFSALGSVDLTNQMKLGAATAGLAYDNVNGHGATLTKTHIPGFGDKMTAAGKVNLFHNDNHDFSAKAFATKNMPNIPQVPNFNTVGAGVDYMFKDKIGASANAAHTDFINRNDYSLGGKLNLFKTPTTSLDFNAGWKKFDTPFFKSSWEPSTSFSFSKYF

SEQ ID NO: 275 - protein, 23 aa, Drosophila melanogaster
QRPYTQPLIYYPPPPTPPRIYRA

SEQ ID NO: 276 - protein, 188 aa, Hyalophora cecropia
DAHGALTLNSDGTSGAVVKVPFAGNDKNIVSAIGSVDLTDRQKLGAATAGVALDNINGHGLSLTDTHIPGFGDKMTAAGKVNVFHNDNHDITAKAFATRNMPDIANVPNFNTVGGGIDYMFKDKIGASASAAHTDFINRNDYSLDGKLNLFKTPDTSIDFNAGFKKFDTPFMKSSWEPNFGFSLSKYF

SEQ ID NO: 277 - protein, 13 aa, Litoria raniformis
GLFDIIKKIAESI

SEQ ID NO: 278 - protein, 13 aa, Litoria raniformis
GLFDIIKKIAESF

SEQ ID NO: 279 - protein, 16 aa, Litoria raniformis
GLLDIVKKVVGAFGSL

SEQ ID NO: 280 - protein, 16 aa, Litoria aurea
GLLDIVKKVVGAFGSL

SEQ ID NO: 281 - protein, 14 aa, Litoria aurea
FDIVKKVVGALGSL

SEQ ID NO: 282 - protein, 16 aa, Litoria aurea
GLFDIVKKVVGAIGSL

SEQ ID NO: 283 - protein, 14 aa, Litoria aurea
FDIVKKVVGTIAGL

SEQ ID NO: 284 - protein, 16 aa, Litoria raniformis
GLFDIVKKVVGAFGSL

SEQ ID NO: 285 - protein, 16 aa, Litoria aurea
GLFDIVKKVVGAFGSL

SEQ ID NO: 286 - protein, 16 aa, Litoria raniformis
GLFDIAKKVIGVIGSL

SEQ ID NO: 287 - protein, 17 aa, Litoria raniformis
GLFDIVKKIAGHIAGSI

SEQ ID NO: 288 - protein, 17 aa, Litoria aurea
GLFDIVKKIAGHIAGSI

SEQ ID NO: 289 - protein, 17 aa, Litoria raniformis
GLFDIVKKIAGHIASSI

SEQ ID NO: 290 - protein, 17 aa, Litoria aurea
GLFDIVKKIAGHIASSI

SEQ ID NO: 291 - protein, 17 aa, Litoria raniformis
GLFDIVKKIAGHIVSSI

SEQ ID NO: 292 - protein, 25 aa, Litoria raniformis
GLMSSIGKALGGLIVDVLKPKTPAS

SEQ ID NO: 293 - protein, 25 aa, Litoria aurea
GLMSSIGKALGGLIVDVLKPKTPAS

SEQ ID NO: 294 - protein, 219 aa, Sus scrofa
IVGGRRAQPQEFPFLASIQKQGRPFCAGALVHPRFVLTAASCFRGKNSGSASVVLGAYDLRQQEQSRQTFSIRSISQNGYDPRQNLNDVLLLQLDREARLTPSVALVPLPPQNATVEAGTNCQVAGWGTQRLRRLFSRFPRVLNVTVTSNPCLPRDMCIGVFSRRGRISQGDRGTPLVCNGLAQGVASFLRRRFRRSSGFFTRVALFRNWIDSVLNNPP

SEQ ID NO: 295 - protein, 42 aa, Bos taurus
RFRPPIRRPPIRPPFYPPFRPPIRPPIFPPIRPPFRPPLRFP

SEQ ID NO: 296 - protein, 12 aa, Ovis aries
RICRIIFLRVCR

SEQ ID NO: 297 - protein, 46 aa, Capra hircus
RFRPPIRRPPIRPPFNPPFRPPVRPPFRPPFRPPFRPPIGPFPGRR

SEQ ID NO: 298 - protein, 55 aa, Bos taurus
RRIRPRPPRLPRPRPRPLPFPRPGPRPIPRPLPFPRPGPRPIPRPLPFPRPGPRP

SEQ ID NO: 299 - protein, 456 aa, Bos taurus
TNPGIVARITQKGLDYACQQGVLTLQKELEKITIPNFSGNFKIKYLGKGQYSFFSMVIQGFNLPNSQIRPLPDKGLDLSIRDASIKIRGKWKARKNFIKLGGNFDLSVEGISILAGLNLGYDPASGHSTVTCSSCSSGINTVRIHISGSSLGWLIQLFRKRIESLLQKSMTRKICEVVTSTVSSKLQPYFQTLPVTTKLDKVAGVDYSLVAPPRATANNLDWLLKGEFFSLAHRSPPPFAPPALAFPSDHDRMVYLGISEYFFNTAGFVYQKAGALNLTLRDDMIPKESKFRLTTKFFGILIPQVAKMFPDMQMQLFIWASLPPKLTMKPSGLDLIFVLDTQAFAILPNSSLDPLFLLEMNLNLSVVVGAKSDRLIGELRLDKLLLELKHSDIGPFSVESLQSVINYVMPTIVLPVINKKLQKGFPLPLPAYIELFNLTLQPYQDFLLFGADVHYS

SEQ ID NO: 300 - protein, 445 aa, Oryctolagus cuniculus
QKGLDYACQQGVAVLQKELEKIRIPDVSGKFKLRPFGKGHYNFHSLVVRSFQLPNPQIRLQPNVGLRVSISNANVRIGGRWKARKGFIKVRGKFDLSVEGVSISADLKLGSVPASGRATVTCSSCSSNINRARLRSQASWGGWLKLFHKRIESSLRNTMNSKICQVLTSSVSSKLQPYVETLPLKERLDSVAGIDYSLVAPPRATADSLDMQLKGEFYNVARPSPPPFMPPPMAIPSLHDRMIYLAISDYLFNTAALVYQQAGAFGLTLRDDMIPKESKSRLTTKFLGKALPQVAKMFPNMNVQLTLSVSSPPHLTTRPTGIALTAAVDLQAFAILPNSSLASLFLLGLKLNTSAKIGTKADKLVGELTLGRLILELKHSNIGSFPVQLLQALMDYVLSAVVLPKVNEKLQRGLPLPMPRKVQLYDLVLQPHQDFLLLGANVQHG

SEQ ID NO: 301 - protein, 456 aa, Homo sapiens
VNPGVVVRISQKGLDYASQQGTAALQKELKRIKIPDYSDSFKIKHLGKGHYSFYSMDIREFQLPSSQISMVPNVGLKFSISNANIKISGKWKAQKRFLKMSGNFDLSIEGMSISADLKLGSNPTSGKPTITCSSCSSHINSVHVHISKSKVGWLIQLFHKKIESALRNKMNSQVCEKVTNSVSSELQPYFQTLPVMTKIDSVAGINYGLVAPPATTAETLDVQMKGEFYSENHHNPPPFAPPVMEFPAAHDRMVYLGLSDYFFNTAGLVYQEAGVLKMTLRDDMIPKESKFRLTTKFFGTFLPEVAKKFPNMKIQIHVSASTPPHLSVQPTGLTFYPAVDVQAFAVLPNSSLASLFLIGMHTTGSMEVSAESNRLVGELKLDRLLLELKHSNIGPFPVELLQDIMNYIVPILVLPRVNEKLQKGFPLPTPARVQLYNVVLQPHQNFLLFGADVVYK

SEQ ID NO: 302 - protein, 456 aa, Mus musculus
TDPGFVAMISQKGLDFACQQGVVELQKELQAISVPDFSGVFKIKHLGKGSYEFYSMAVDGFHIPNPKIEMLPSDGLRVFIKDASIKINGKWMSRKNFLKAGGNFELSIQGVSISTDLILGSDSSGHITTICSNCDSHIDSVHIKISGSMLGWLIRLFHRKIETSLKNIIYKKICKIVRDSVSSKLQPYLKTLSVITRVDDVTSVDYSLLAPLTTTNQFLEGQLKGEFFWRGHRDPLPIHPPVMRFVPNGAYMVCMGISDYFFNTEVLAYQQSGTLKMTLGGQLLSNNGRFQLNTDFLRTFLPKVAKMFPSMGVQLLISAPVPVHLSIQPSGLSFNPKLETQAFVVLPNASLVPLFVLGMKTNASLEVDAEENRLVGEMKLGSRWLLELKESKFGPFKVEYLEDVINYLVSTLVLPKINERLRRGFPLPLPAGIRFSHFTFYPYQNFLLLEADLHLI

SEQ ID NO: 303 - protein, 37 aa, Manduca sexta
WNPFKELERAGQRVRDAVISAAPAVATVGQAAAIARG

SEQ ID NO: 304 - protein, 37 aa, Manduca sexta
WNPFKELERAGQRVRDAIISAGPAVATVGQAAAIARG

SEQ ID NO: 305 - protein, 37 aa, Manduca sexta
WNPFKELERAGQRVRDAIISAAPAVATVGQAAAIARG

SEQ ID NO: 306 - protein, 37 aa, Manduca sexta
WNPFKELERAGQRVRDAVISAAAVATVGQAAAIARGG

SEQ ID NO: 307 - protein, 8 aa, Rhizobium leguminosarum
  Rhizobium leguminosarum bv viciae
ASILTNAS

SEQ ID NO: 308 - protein, 43 aa, Enterococcus faecalis
  Enterococcus faecalis YI717
ATYYGNGLYCNKQKCWVDWNKASREIGKIIVNGWVQHGPWAPR

SEQ ID NO: 309 - protein, 26 aa, Lactobacillus acidophilus
KTHYPTNAWKSLWKGFWESLRYTDGF

SEQ ID NO: 310 - protein, 50 aa, Lactobacillus amylovorus
NRWTNAYSAALGCAVPGVKYGKKLGGVWGAVIGGVGGAAVCGLAGYVRKG

SEQ ID NO: 311 - protein, 30 aa, Enterococcus faecalis
AKEFGIPAAVAGTVLNVVEAGGWVTTIVSI

SEQ ID NO: 312 - protein, 51 aa, Staphylococcus aureus [sequence omitted]

SEQ ID NO: 313 - protein, 41 aa, Lactobacillus sakei
  MOD_RES (9)..(9): Any amino acid
  MOD_RES (14)..(14): Any amino acid
  MOD_RES (33)..(33): Any amino acid
  MOD_RES (37)..(37): Any amino acid
KYYGNGVHXGKHSXTVDWGTAIGNIGNNAAANXATGXNAGG

SEQ ID NO: 314 - protein, 48 aa, Carnobacterium maltaromaticum
VNYGNGVSCSKTKCSVNWGQAFQERYTAGINSFVSGVASGAGSIGRRP

SEQ ID NO: 315 - protein, 43 aa, Carnobacterium maltaromaticum
AISYGNGVYCNKEKCWVNKAENKQAITGIVIGGWASSLAGMGH

SEQ ID NO: 316 - protein, 41 aa, Lactobacillus curvatus
ARSYGNGVYCNNKKCWVNRGEATQSIIGGMISGWASGLAGM

SEQ ID NO: 317 - protein, 38 aa, Lactobacillus curvatus
  MOD_RES (34)..(34): Any amino acid
  MOD_RES (37)..(37): Any amino acid
YTAKQCLQAIGSCGIAGTGAGAAGGPAGAFVGAXVVXI

SEQ ID NO: 318 - protein, 43 aa, Carnobacterium divergens
TKYYGNGVYCNSKKCWVDWGTAQGCIDVVIGQLGGGIPGKGKC

SEQ ID NO: 319 - protein, 39 aa, Enterococcus faecium
TTKNYGNGVCNSVNWCQCGNVWASCNLATGCAAWLCKLA

SEQ ID NO: 320 - protein, 44 aa, Enterococcus hirae
ATYYGNGLYCNKEKCWVDWNQAKGEIGKIIVNGWVNHGPWAPRR

SEQ ID NO: 321 - protein, 27 aa, Lactococcus lactis
KGGSGVIHTISHEVIYNSWNFVFTCCS

SEQ ID NO: 322 - protein, 57 aa, Lactobacillus johnsonii
RNNWQTNVGGAVGSAMIGATVGGTICGPACAVAGAHYLPILWTAVTAATGGFGKIRK

SEQ ID NO: 323 - protein, 37 aa, Lactobacillus sakei
  Lactobacillus sakei L45
STPVLASVAVSMELLPTASVLYSDVAGCFKYSAKHHC

SEQ ID NO: 324 - protein, 37 aa, Lactococcus lactis
  subsp. lactis
TSYGNGVHCNKSKCWIDVSELETYKAGTVSNPKDILW

SEQ ID NO: 325 - protein, 43 aa, Leuconostoc mesenteroides
KNYGNGVHCTKKGCSVDWGYAWTNIANNSVMNGLTGGNAGWHN

SEQ ID NO: 326 - protein, 37 aa, Leuconostoc gelidum
KYYGNGVHCTKSGCSVNWGEAFSAGVHRLANGGNGFW

SEQ ID NO: 327 - protein, 31 aa, Leuconostoc mesenteroides
KGKGFWSWASKATSWLTGPQQPGSPLLKKHR

SEQ ID NO: 328 - protein, 37 aa, Leuconostoc mesenteroides
KYYGNGVHCTKSGCSVNWGEAASAGIHRLANGGNGFW

SEQ ID NO: 329 - protein, 44 aa, Pediococcus acidilactici
KYYGNGVTCGKHSCSVDWGKATTCIINNGAMAWATGGHQGNHKC

SEQ ID NO: 330 - protein, 44 aa, Carnobacterium maltaromaticum
KYYGNGVSCNKNGCTVDWSKAIGIIGNNAAANLTTGGAAGWNKG

SEQ ID NO: 331 - protein, 41 aa, Lactobacillus sakei; identical to SEQ ID NO: 316

SEQ ID NO: 332 - protein, 44 aa, Enterococcus faecium; identical to SEQ ID NO: 320
  Enterococcus faecium T8

SEQ ID NO: 333 - protein, 18 aa, Bacillus thuringiensis
  Bacillus thuringiensis serovar entomocidus
DWTAWSALVAAACSVELL

SEQ ID NO: 334 - protein, 49 aa, Streptococcus uberis
KTVNYGNGLYCNQKKCWVNWSETATTIVNNSIMNGLTGGNAGWHSGGRA

SEQ ID NO: 335 - protein, 70 aa, Streptococcus uberis
LAGYTGIASGTAKKVVDAIDKGAAAFVIISIISTVISAGALGAVSASADFIILTVKNYISRNLKAQAVIW

SEQ ID NO: 336 - protein, 36 aa, Chinchilla lanigera
QRYFCRVRGGRCAALTCLPRETQIGRCSVKGRKCCR

SEQ ID NO: 337 - protein, 50 aa, Mus musculus
LDTIKCLQGNNNCHIQKCPWFLLQVSTCYKGKGRCCQKRRWFARSHVYHV

SEQ ID NO: 338 - protein, 42 aa, Sus scrofa
KNIGNSVSCLRNKGVCMPGKCAPKMKQIGTCGMPQVKCCKRK

SEQ ID NO: 339 - protein, 37 aa, Mus musculus
DQYKCLQHGGFCLRSSCPSNTKLQGTCKPDKPNCCKS

SEQ ID NO: 340 - protein, 60 aa, Oncorhynchus mykiss
MVTLVLLVFLLLNVVEDEAASFPFSCPTLSGVCRKLCLPTEMFFGPLGCGKGFLCCVSHF

SEQ ID NO: 341 - protein, 38 aa, Capra hircus
SRRSCHRNKGVCALTRCPRNMRQIGTCFGPPVKCCRKK

SEQ ID NO: 342 - protein, 36 aa, Cercopithecus erythrogaster
DHYICVRSGGQCLYSACPIYTKIQGTCYHGKAKCCK

SEQ ID NO: 343 - protein, 36 aa, Gorilla gorilla
  Gorilla gorilla gorilla
DHYNCVSSGGQCLYSACPIFTKIQGTCYGGKAKCCK

SEQ ID NO: 344 - protein, 36 aa, Homo sapiens
DHYNCVSSGGQCLYSACPIFTKIQGTCYRGKAKCCK

SEQ ID NO: 345 - protein, 36 aa, Nomascus concolor
DHYNCVRSGGQCLYSACPIYTKIQGTCYQGKAKCCK

SEQ ID NO: 346 - protein, 36 aa, Hylobates lar; identical to SEQ ID NO: 345

SEQ ID NO: 347 - protein, 36 aa, Hylobates moloch; identical to SEQ ID NO: 345

SEQ ID NO: 348 - protein, 42 aa, Ovis aries
QGVRNRLSCHRNKGVCVPSRCPRHMRQIGTCRGPPVKCCRKK

SEQ ID NO: 349 - protein, 36 aa, Pan troglodytes; identical to SEQ ID NO: 343

SEQ ID NO: 350 - protein, 36 aa, Papio anubis
DHYNCVRSGGQCLYSACPIYTRIQGTCYHGKAKCCK

SEQ ID NO: 351 - protein, 36 aa, Pongo pygmaeus; identical to SEQ ID NO: 344

SEQ ID NO: 352 - protein, 36 aa, Trachypithecus cristatus
DHYNCVRSGGQCLYSACPIYTKIQGTCYHGKAKCCK

SEQ ID NO: 353 - protein, 36 aa, Presbytis melalophos; identical to SEQ ID NO: 352

SEQ ID NO: 354 - protein, 36 aa, Trachypithecus obscurus; identical to SEQ ID NO: 352

SEQ ID NO: 355 - protein, 37 aa, Rattus norvegicus
DQYRCLQNGGFCLRSSCPSHTKLQGTCKPDKPNCCRS

SEQ ID NO: 356 - protein, 36 aa, Saguinus oedipus
DHYNCVKGGGQCLYSACPIYTKVQGTCYGGKAKCCK

SEQ ID NO: 357 - protein, 38 aa, Bos taurus
DFASCHTNGGICLPNRCPGHMIQIGICFRPRVKCCRSW

SEQ ID NO: 358 - protein, 37 aa, Gallus gallus
NNEAQCEQAGGICSKDHCFHLHTRAFGHCQRGVPCRT

SEQ ID NO: 359 - protein, 40 aa, Bos taurus
EGVRSYLSCWGNRGICLLNRCPGRMRQIGTCLAPRVKCCR

SEQ ID NO: 360 - protein, 45 aa, Pan troglodytes
GIINTLQKYYCRVRGGRCAVLTCLPKEEQIGKCSTRGRKCCRRKK

SEQ ID NO: 361 - protein, 44 aa, Pan troglodytes
AIHRALISKRMEGHCEAECLTFEVKTGGCRAELAPFCCKNRKKH

SEQ ID NO: 362 - protein, 44 aa, Pongo pygmaeus
AIHRALICKRMEGHCEAECLTFEVKIGGCRAELAPFCCKNRKKH

SEQ ID NO: 363 - protein, 51 aa, Homo sapiens
KFKEICERPNGSCRDFCLETEIHVGRCLNSRPCCLPLGHQPRIESTTPKKD

SEQ ID NO: 364 - protein, 51 aa, Pan troglodytes
KFKEICERPDGSCRDFCLETEIHVGRCLNSRPCCLPLGHQPRIESTTPKKD

SEQ ID NO: 365 - protein, 38 aa, Bos taurus
GPLSCRRNGGVCIPIRCPGPMRQIGTCFGRPVKCCRSW

SEQ ID NO: 366 - protein, 41 aa, Canis lupus
  Canis lupus familiaris
NFDPKYRFERCAKVKGICKTFCDDDEYDYGYCIKWRNQCCI

SEQ ID NO: 367 - protein, 43 aa, Homo sapiens
AYSGEKKCWNRSGHCRKQCKDGEAVKDTCKNLRACCIPSNEDH

SEQ ID NO: 368 - protein, 63 aa, Homo sapiens
KRHILRCMGNSGICRASCKKNEQPYLYCRNCQSCCLQSYMRISISGKEENTDWSYEKQWPRLP

SEQ ID NO: 369 - protein, 51 aa, Mus musculus
GLEYSQSFPGGEIAVCETCRLGRGKCRRTCIESEKIAGWCKLNFFCCRERI

SEQ ID NO: 370 - protein, 38 aa, Bos taurus
GPLSCGRNGGVCIPIRCPVPMRQIGTCFGRPVKCCRSW

SEQ ID NO: 371 - protein, 47 aa, Homo sapiens
SFEPQKCWKNNVGHCRRRCLDTERYILLCRNKLSCCISIISHEYTRR

SEQ ID NO: 372 - protein, 43 aa, Macaca fascicularis
NLYVKRCLNDIGICKKTCKPEEVRSEHGWVMCGKRKACCVPAD

SEQ ID NO: 373 - protein, 164 aa, Pongo pygmaeus
EFIGLRRCLMGFGRCRDHCNVDEKEIQKCKMKKCCVGPKVVKLIKNYLQYGIPNVLNEDVQEMLKPAKNSSAVIQRKHILSVLPQIKSTSFFANTNFVIIPNATPMNSATISTMTPGQITYTATSTKSNTKESRDSATASPPPAPPPPNILPTPSLELEKAEEQ

SEQ ID NO: 374 - protein, 42 aa, Mus musculus
TLYRRFLCKKMNGQCEAECFTFEQKIGTCQANFLCCRKRKEH

SEQ ID NO: 375 - protein, 42 aa, Bos taurus
SGISGPLSCGRNGGVCIPIRCPVPMRQIGTCFGRPVKCCRSW

SEQ ID NO: 376 - protein, 59 aa, Mus musculus
FFDEKCSRVNGRCTASCLKNEELVALCQKNLKCCVTVQPCGKSKSNQSDEGSGHMGTWG

SEQ ID NO: 377 - protein, 59 aa, Rattus norvegicus
FFDEKCSRINGRCTESCLKNEELIALCQKNLKCCVTVQPCGRDKGDELDEDSGYNRTRG

SEQ ID NO: 378 - protein, 46 aa, Rattus norvegicus
KRSYPEYGSLDLRKECRMSKGHCKLQCSENEIRIAFCIRPGTHCCI

SEQ ID NO: 379 - protein, 64 aa, Mus musculus
GKNPILQCMGNRGFCRSSCKKSEQAYFYCRTFQMCCLQSYVRISLTGVDDNTNWSYEKHWPRIP

SEQ ID NO: 380 - protein, 42 aa, Ovis aries
HGVTDSLSCRWKKGICVLTRCPGTMRQIGTCFGPPVKCCRLK

SEQ ID NO: 381 - protein, 41 aa, Pan troglodytes
GISDPVTCLKSGAICHPVFCPRRYKQIGTCGLPGTKCCKKP

SEQ ID NO: 382 - protein, 40 aa, Bubalus bubalis
VRNHVTCRINRGFCVPIRCPGRTRQIGTCFGPRIKCCRSW

SEQ ID NO: 383 - protein, 36 aa, Macaca mulatta
DPVTCLKNGAICHPVFCPRRYKQIGTCGLPGTKCCK

SEQ ID NO: 384 - protein, 40 aa, Bos taurus; identical to SEQ ID NO: 382

SEQ ID NO: 385 - protein, 75 aa, Rattus norvegicus
KRCFSNVAGYCRKRCRLVEISEMGCLHGKYCCVNELENKRHKKDTVVEQPMEPRDKSKVQDYMVLPTITYYTITI

SEQ ID NO: 386 - protein, 75 aa, Mus musculus
KRCFSNVEGYCRKKCRLVEISEMGCLHGKYCCVNELENKKHKKHSVVEETVKLQDKSKVQDYMILPTVTYYTISI

SEQ ID NO: 387 - protein, 49 aa, Rattus norvegicus
EFKRCWNGQGACRTYCTRQEKFIHLCPDASLCCLSYSLKASPHSRAGGV

SEQ ID NO: 388 - protein, 49 aa, Mus musculus
EFKRCWNGQGACRTFCTRQETFMHLCPDASLCCLSYSFKPSRPSRVGDV

SEQ ID NO: 389 - protein, 55 aa, Mus musculus
GLFGFRSSKRQEPWIACELYQGLCRNACQKYEIQYLSCPKTRKCCLKYPRKITSF

SEQ ID NO: 390 - protein, 55 aa, Rattus norvegicus
GLFGLRSGKRREPWVSCELYQGSCRNACQKYEIQYLTCPKKRKCCLKFPMKITRV

SEQ ID NO: 391 - protein, 41 aa, Mus musculus
KKINNPVSCLRKGGRCWNRCIGNTRQIGSCGVPFLKCCKRK

SEQ ID NO: 392 - protein, 42 aa, Bos taurus
EGVRNHVTCRINRGFCVPIRCPGRTRQIGTCFGPRIKCCRSW

SEQ ID NO: 393 - protein, 53 aa, Rattus norvegicus
GVNMYIRQIYDTCWKLKGHCRNVCGKKEIFHIFCGTQFLCCIERKEMPVLFVK

SEQ ID NO: 394 - protein, 53 aa, Mus musculus
GVNMYIKRIYDTCWKLKGICRNTCQKEEIYHIFCGIQSLCCLEKKEMPVLFVK

SEQ ID NO: 395 - protein, 42 aa, Rattus norvegicus
RKRNTKFRQCEKMGGICKYQKTHGCSILPAECKSRYKHCCRL

SEQ ID NO: 396 - protein, 42 aa, Mus musculus
RKRNSKFRPCEKMGGICKSQKTHGCSILPAECKSRYKHCCRL

SEQ ID NO: 397 - protein, 45 aa, Mus musculus
QKCWNLHGKCRHRCSRKESVYVYCTNGKMCCVKPKYQPKPKPWMF

SEQ ID NO: 398 - protein, 42 aa, Rattus norvegicus
TDQDTAKCVQKKNVCYYFECPWLSISVSTCYKGKAKCCQKRY

SEQ ID NO: 399 - protein, 42 aa, Mus musculus
IGPDTKKCVQRKNACHYFECPWLYYSVGTCYKGKGKCCQKRY

SEQ ID NO: 400 - protein, 50 aa, Rattus norvegicus
IDSVKCFQKNNTCHTIRCPYFQDEVGTCYEGRGKCCQKRLLSIRVPKKKV

SEQ ID NO: 401 - protein, 41 aa, Mus musculus
QIINNPITCMTNGAICWGPCPTAFRQIGNCGHFKVRCCKIR

SEQ ID NO: 402 - protein, 41 aa, Rattus norvegicus
QSINNPITCLTKGGVCWGPCTGGFRQIGTCGLPRVRCCKKK

SEQ ID NO: 403 - protein, 41 aa, Bos taurus
ERVRNPQSCRWNMGVCIPFLCRVGMRQIGTCFGPRVPCCRR

SEQ ID NO: 404 - protein, 43 aa, Mus musculus
RSHIDIKNGIERCEKVRGMCKTVCDIDEYDYGYCIRWRNQCCI

SEQ ID NO: 405 - protein, 48 aa, Rattus norvegicus
FLANQECFSEYRHCRMKCKANEYAIRYCADWTICCRVKKREAKKKIMW

SEQ ID NO: 406 - protein, 47 aa, Mus musculus
FLENQDCSKHRHCRMKCKANEYAVRYCEDWTICCRVKKKESKKKKMW

SEQ ID NO: 407 - protein, 38 aa, Gallus gallus
ADTLACRQSHGSCSFVACRAPSVDIGTCRGGLKKCCKW

SEQ ID NO: 408 - protein, 41 aa, Rattus norvegicus
QSINNPVSCVTHGGICWGRCPGSFRQIGTCGLGKVRCCKKK

SEQ ID NO: 409 - protein, 41 aa, Mus musculus
KTINNPVSCCMIGGICRYLCKGNILQNGNCGVTSLNCCKRK

SEQ ID NO: 410 - protein, 40 aa, Bos taurus
EVVRNPQSCRWNMGVCIPISCPGNMRQIGTCFGPRVPCCR

SEQ ID NO: 411 - protein, 40 aa, Bos taurus
QVVRNPQSCRWNMGVCIPISCPGNMRQIGTCFGPRVPCCR

SEQ ID NO: 412 - protein, 50 aa, Rattus norvegicus
HPGTVHVRFKCIPKIAAVFGDNCPFYGNVDGLCNDKKSVCCMVPVRLDNI

SEQ ID NO: 413 - protein, 50 aa, Mus musculus
HPGTFHVRIKCMPKMTAVFGDNCSFYSSMGDLCNNTKSVCCMVPVRMDNI

SEQ ID NO: 414 - protein, 41 aa, Mus musculus
QLINSPVTCMSYGGSCQRSCNGGFRLGGHCGHPKIRCCRRK

SEQ ID NO: 415 - protein, 42 aa, Bos taurus
QGVRNHVTCRIYGGFCVPIRCPGRTRQIGTCFGRPVKCCRRW

SEQ ID NO: 416 - protein, 42 aa, Bos taurus
EGVRNHVTCRIYGGFCVPIRCPGRTRQIGTCFGRPVKCCRRW

SEQ ID NO: 417 - protein, 46 aa, Mus musculus
NSKRACYREGGECLQRCIGLFHKIGTCNFRFKCCKFQIPEKKTKIL

SEQ ID NO: 418 - protein, 40 aa, Bos taurus
QGVRNFVTCRINRGFCVPIRCPGHRRQIGTCLGPRIKCCR

SEQ ID NO: 419 - protein, 40 aa, Bos taurus
EGVRNFVTCRINRGFCVPIRCPGHRRQIGTCLGPRIKCCR

SEQ ID NO: 420 - protein, 36 aa, Bos taurus
NFVTCRINRGFCVPIRCPGHRRQIGTCLGPRIKCCR

SEQ ID NO: 421 - protein, 35 aa, Mus musculus
NEPVSCIRNGGICQYRCIGLRHKIGTCGSPFKCCK

SEQ ID NO: 422 - protein, 38 aa, Bos taurus
VRNFVTCRINRGFCVPIRCPGHRRQIGTCLGPQIKCCR

SEQ ID NO: 423 - protein, 41 aa, Gallus gallus
NNEAQCEQAGGICSKDHCFHLHTRAFGHCQRGVPCCRTVYD

SEQ ID NO: 424 - protein, 43 aa, Mus musculus
IIGVSEMERCHKKGGYCYFYCFSSHKKIGSCFPEWPRCCKNIK

SEQ ID NO: 425 - protein, 48 aa, Rattus norvegicus
ELKHLGLKTEFEQCQRIRGYCLNTYCRFPTSHVGSCYPEKRYCCKNIR

SEQ ID NO: 426 - protein, 40 aa, Bos taurus
EGVRNFVTCRINRGFCVPIRCPGHRRQIGTCLGPQIKCCR

SEQ ID NO: 427 - protein, 40 aa, Bos taurus
QGVRNFVTCRINRGFCVPIRCPGHRRQIGTCLAPQIKCCR

SEQ ID NO: 428 - protein, 35 aa, Bos taurus
PLSCRRKGGICILIRCPGPMRQIGTCFGRPVKCCR

SEQ ID NO: 429 - protein, 48 aa, Rattus norvegicus
ELKHLGMTAETEWCRLFEGFCHDKNCPPPTSHVGSCHPEKRSCCKDRR

SEQ ID NO: 430 - protein, 45 aa, Pongo pygmaeus
GIINTLQKYYCRVRGGRCAVLSCLPKEEQIGKCSTRGRKCCRRKK

SEQ ID NO: 431 - protein, 45 aa, Gorilla gorilla; identical to SEQ ID NO: 430
  Gorilla gorilla gorilla

SEQ ID NO: 432 - protein, 45 aa, Equus caballus
GIINMLQKSYCKIRKGRCALLGCLPKEEQIGSCSVSGRKCCRKKK

SEQ ID NO: 433 - protein, 44 aa, Macaca fascicularis
AIHRALICKRMEGHCEAECLTFEVKIGGCRAELTPYCCKKRKKD

SEQ ID NO: 434 - protein, 44 aa, Hylobates lar; identical to SEQ ID NO: 362

SEQ ID NO: 435 - protein, 44 aa, Gorilla gorilla
  Gorilla gorilla gorilla
AIHRALICKRMEGHCEAECLTFEAKIGGCRAELAPFCCKNRKKH

SEQ ID NO: 436 - protein, 51 aa, Homo sapiens
KFKEICERPNGSCRDFCLETEIHVGRCLNSQPCCLPLGHQPRIESTTPKKD

SEQ ID NO: 437 - protein, 65 aa, Pan troglodytes
GLGPAEGHCLNLSGVCRRDVCKVVEDQIGACRRRMKCCRAWWILMPIPTPLIMSDYQEPLKRKLK

SEQ ID NO: 438 - protein, 65 aa, Homo sapiens
GLGPAEGHCLNLFGVCRTDVCNIVEDQIGACRRRMKCCRAWWILMPIPTPLIMSDYQEPLKPNLK

SEQ ID NO: 439 - protein, 46 aa, Rattus norvegicus
FLRRSVSGFQECHSKGGYCYRYYCPRPHRRLGSCYPYAANCCRRRR

SEQ ID NO: 440 - protein, 41 aa, Homo sapiens
NFEPKYRFERCEKVRGICKTFCDDVEYDYGYCIKWRSQCCV

SEQ ID NO: 441 - protein, 48 aa, Pan troglodytes
KMKYPEYGSLDLRRECRMGNGRCKNQCHENEIRIAYCIRPGTHCCLQQ

SEQ ID NO: 442 - protein, 48 aa, Homo sapiens
KKKYPEYGSLDLRRECRIGNGQCKNQCHENEIRIAYCIRPGTHCCLQQ

SEQ ID NO: 443 - protein, 66 aa, Pan troglodytes
GPSVPQKKTREVAEKKRECQLVRGACKPECNSWEYVYYYCNVNPCCVVQEYQKPIINKITSKLHQK

SEQ ID NO: 444 - protein, 66 aa, Homo sapiens
GPSVPQKKTREVAERKRECQLVRGACKPECNSWEYVYYYCNVNPCCAVWEYQKPIINKITSKLHQK

SEQ ID NO: 445 - protein, 43 aa, Homo sapiens
DRCTKRYGRCKRDCLESEKQIDICSLPRKICCTEKLYEEDDMF

SEQ ID NO: 446 - protein, 61 aa, Homo sapiens
QTAPDGWIRRCYYGTGRCRKSCKEIERKKEKCGEKHICCVPKEKDKLSHIHDQKETSELYI

SEQ ID NO: 447 - protein, 79 aa, Pan troglodytes
GLFRSHNGKSREPWNPCELYQGMCRNACREYEIQYLTCPNDQKCCLKLSVKITSSKNVKEDYDSNSNLSVTNSSSYSHI

SEQ ID NO: 448 - protein, 79 aa, Homo sapiens; identical to SEQ ID NO: 447

SEQ ID NO: 449 - protein, 43 aa, Pongo pygmaeus
AYSGEKKCWNRSGHCRKQCKDGEAVKDTCKNLRACCVPSNEDH

SEQ ID NO: 450 - protein, 43 aa, Macaca fascicularis
AYGGEKKCWNRSGHCRKQCKDGEAVKETCKNHRACCVPSNEDH

SEQ ID NO: 451 - protein, 43 aa, Hylobates lar; identical to SEQ ID NO: 449

SEQ ID NO: 452 - protein, 43 aa, Gorilla gorilla; identical to SEQ ID NO: 449
  Gorilla gorilla gorilla

SEQ ID NO: 453 - protein, 43 aa, Pan troglodytes; identical to SEQ ID NO: 449

SEQ ID NO: 454 - protein, 43 aa, Macaca mulatta; identical to SEQ ID NO: 450

SEQ ID NO: 455 - protein, 63 aa, Pongo pygmaeus
KRYILRCMGNSGICRASCKRNEQPYLYCKNYQSCCLQSYMRISISGKEENTDWSYEKQWPKLP

SEQ ID NO: 456 - protein, 63 aa, Macaca fascicularis
KRHNLRCMGNSGICRASCKKNEQPYLYCRNYQACCLQSYMRISISGKEENTDWSYEKQWPRLP

SEQ ID NO: 457 - protein, 63 aa, Hylobates lar
KHHILRCMGNSGICRASCKKNEQPYLYCRNYQHCCLQSYMRISISGEEENTDWSYEKQWPRLP

SEQ ID NO: 458 - protein, 63 aa, Gorilla gorilla
  Gorilla gorilla gorilla
KRHILRCMGNSGICRASCKKNEQPYLYCRNYQSCCLQSYMRISISGKEEDTDWSYEKQWPRLP

SEQ ID NO: 459 - protein, 63 aa, Bos taurus
RRHMLRCMGDLGICRPACRQSEEPYLYCRNYQPCCLPFYVRIDISGKEGKNDWSRENRWPKVS

SEQ ID NO: 460 - protein, 63 aa, Canis lupus
  Canis lupus familiaris
KHHILRCMGNTGICRPSCRKTEQPYLYCLNYQSCCLQSYMRISISGREEKDDWSQQNRWPKIS

SEQ ID NO: 461 - protein, 63 aa, Pan troglodytes
KRHILRRMGNSGICRASCKKNEQPYLYCRNYQSCCLQSYMRISISGKEENTDWSYEKQWPRLP

SEQ ID NO: 462 - protein, 63 aa, Macaca mulatta
KRHILRCMGNSGICRASCKKNEQPYLYCRNYQACCLQSYMRISISGKEENTDWSYEKQWPRLP

SEQ ID NO: 463 - protein, 51 aa, Rattus norvegicus
GLEYSQSFPGGEFAVCETCRLGRGKCRRTCLDSEKIAGKCKLNFFCCRERI

SEQ ID NO: 464 - protein, 61 aa, Pan troglodytes
QVTPVMKCWGKSGRCRTTCKESEVYYILCKTEAKCCVDPKYVPVKPKLTDRNTSLESTSAV

SEQ ID NO: 465 - protein, 61 aa, Macaca mulatta
QVTPVTKCWGKSGRCRTTCKKSEVYYILCKTEAKCCVDPKYVPVRSKLTDTNTSLESTSAV

SEQ ID NO: 466 - protein, 61 aa, Homo sapiens
QVTPVMKCWGKSGRCRTTCKESEVYYILCKTEAKCCVDPKYVPVKPKLTDTNTSLESTSAV

SEQ ID NO: 467 - protein, 50 aa, Macaca mulatta
VGSIEKCWNFRGSCRDECLKNEKVYVFCMSGKLCCLKPKDQPHLPQRTKN

SEQ ID NO: 468 - protein, 47 aa, Pongo pygmaeus
GTQRCWNLYGKCRHRCSKKERVYVYCVNNKMCCVKPKYQPKERWWRF

SEQ ID NO: 469 - protein, 47 aa, Gorilla gorilla
  Gorilla gorilla gorilla
GTQRCWNLYGKCRYRCSKKERVYVYCINNKMCCVKPKYQPKERWWPF

SEQ ID NO: 470 - protein, 47 aa, Pan troglodytes; identical to SEQ ID NO: 469

SEQ ID NO: 471 - protein, 47 aa, Macaca mulatta
GTQRCWNLYGKCRHRCSKKERVYVYCLNNKMCCVKPKYQPKEKWWPF

SEQ ID NO: 472 - protein, 47 aa, Homo sapiens; identical to SEQ ID NO: 469

SEQ ID NO: 473 - protein, 49 aa, Pan troglodytes
EFKRCWKGQGACRTYCTRQETYMHLCPDASLCCLSYALKPPPVPKHEYE

SEQ ID NO: 474 - protein, 49 aa, Homo sapiens
EFKRCWKGQGACQTYCTRQETYMHLCPDASLCCLSYALKPPPVPKHEYE

SEQ ID NO: 475 - protein, 137 aa, Pongo pygmaeus
SFEPQKCWKNNIGHCRRRCLDTERYILLCRNKLSCCISIIISHEYTRRPAFPVIHLEDITFDYSDVDSFTGSPVSMLNDLITFDTTKFGETITPETNTPETTMPPSETTSSKTTMPPSETATSETMPPPSQTALTHN

SEQ ID NO: 476 - protein, 136 aa, Macaca fascicularis
SFEPQKCWKNNIGYCRRRCLDTERYILLCRNKLSCCISIIISYEYTRRPPFRVIHLEDITFDYSDMGSFTGSPVSKLSDLVTFDIRRETMTPKTNTPETTMPPSETTTSKTTMPSSKTTTSKTTMPPPSQMALTHN

SEQ ID NO: 477 - protein, 126 aa, Hylobates lar
SFEPPKCWKNNIGHCRRRCLDTERYILVCRNKLSCCISIIISHEYTRRPAFPVIHPEDITFDYSDVDSFTGSPVSMLNDLITFDTTKFGETMTPETNTPETTMPPSKTTTSKTTMPPPSQTALTHN

SEQ ID NO: 478 - protein, 137 aa, Gorilla gorilla
  Gorilla gorilla gorilla
SFEPQKCWKNNIGHCRRRCLDTERCILLCRNKLSCCIYIIISHEYTQRPAFPMIHLEDITFDYSDVDSFTGSPVSMLNDLITFDTTKFGETMTPETNTPETTVPPSETTTPETTMPPSETATSETMPPPSQTALTHN

SEQ ID NO: 479 - protein, 137 aa, Pan troglodytes
SFEPQKCWKNNIGHCRRRCLDTERYILLCRNKLSCCISLIISQEYTRRPAFPVIHLEDITFDYSDVDSFTGSPVSMLNDLITFDTTKFGETMTPETNTPETTMPPPETTTPETTMPPSETATSETMPPPSQRALTHN

SEQ ID NO: 480 - protein, 43 aa, Hylobates lar
NWYVKKCLNDVGICKKKCKPEELHVKNGRAMCGKQRDCCVPAD

SEQ ID NO: 481 - protein, 43 aa, Homo sapiens
NWYVKKCLNDVGICKKKCKPEEMHVKNGWAMCGKQRDCCVPAD

SEQ ID NO: 482 - protein, 43 aa, Pongo pygmaeus
SWYVKKCLNDVGICKKKCKPEELHVKNGWAMCGKQRDCCVPAD

SEQ ID NO: 483 - protein, 43 aa, Pan troglodytes
NWYVKKCLNDVGICKKKCKPGEMHIKNGWATCGKQRDCCVPAD

SEQ ID NO: 484 - protein, 43 aa, Gorilla gorilla; identical to SEQ ID NO: 481
  Gorilla gorilla gorilla

SEQ ID NO: 485 - protein, 43 aa, Homo sapiens
LKKCWNNYVQGHCRKICRVNEVPEALCENGRYCCLNIKELEAC

SEQ ID NO: 486 - protein, 43 aa, Pan troglodytes; identical to SEQ ID NO: 485

SEQ ID NO: 487 - protein, 75 aa, Pongo pygmaeus
ARLKKCFNNVTGYCRKKCKVGERYEIGCLSGKLCCINYEEEKEHVSFKKPHQHSGEKLSVQQDYIILPTVTIFTV

SEQ ID NO: 488 - protein, 75 aa, Macaca fascicularis
ARLKKCFNNVTGYCRKKCKVGEIHEIGCLSGKLCCVNDEENKKHVPFKKPHQQPVEKLSVQQDYVILPTITIFTV

SEQ ID NO: 489 - protein, 75 aa, Hylobates lar
ARLKKCFNNITGYCRKKCKVGERYEIGCLSGKLCCVNDEEEKKHVSFKKPHQHSGEKLSVQQDYIILPTITIFAV

SEQ ID NO: 490 - protein, 75 aa, Homo sapiens
ARLKKCFNKVTGYCRKKCKVGERYEIGCLSGKLCCANDEEEKKHVSFKKPHQHSGEKLSVLQDYIILPTITIFTV

SEQ ID NO: 491 - protein, 164 aa, Macaca fascicularis
EFIGLRSCLMGFGRCRDHCNVDEKEIQKCKMKKCCVGPKVVKLIKNYLQYGTPNVLNEDVQEMLKPAENSSAVIQRKHILSILPQIKSINFFANTNLVIIPNATPVNSATVSTMTSGQITYTATSAKSNTKESGDSATASPPPAPPPPNILPTPSLELEEAEEQ

SEQ ID NO: 492 - protein, 154 aa, Hylobates lar
EFIGLRRCLMGFGRCRDHCNVDEKEIQKCKMKKCCVGPKVVKLIKNYLQYGTPNVLNEDVQEMLKSAKNSSAVIQRKHILSVLPQIKSTSFFANTNFVIIPNATPMNSAIISTVTPGQITYTAASTKSNIKESRDSATASPPPAPPPPNTLPTP

SEQ ID NO: 493 - protein, 164 aa, Gorilla gorilla
  Gorilla gorilla gorilla
EFIGLRRCLMGLGRCRDHCNVDEKEIQKCKMKKCCVGPKVVKLIKNYLQYGTPNVLNEDVQEMLKPAKNSSAVIQRKHILSVLPQIKSTSFFANTNFVIIPNATPMNSATISTMTPGQITYTATSTKSNTKESRDSATASSPPAPPPPNILPTPSLELEEAEEQ

SEQ ID NO: 494 - protein, 164 aa, Pan troglodytes
EFIGLRRCLMGLGRCRDHCNVDEKEIQKCKMKKCCVGPKVVKLIKNYLQYGTPNVLNEDVQEMLKPAKNSSAVIQRKHILSVLPQIKSTSFFANTNFVIIPNATPMNSATISTMTPGQITYTATSTKSNTKESRDSATASPPPAPPPPNILPTPSLELEEAEEQ

SEQ ID NO: 495 - protein, 164 aa, Homo sapiens; identical to SEQ ID NO: 494

SEQ ID NO: 496 - protein, 44 aa, Rattus norvegicus
TLYRRFLCKKMKGRCETACLSFEKKIGTCRADLTPLCCKEKKKH

SEQ ID NO: 497 - protein, 57 aa, Pan troglodytes
GVIPGQKQCIALKGVCRDKLCSTLDDTIGICNEGKKCCRRWWILEPYPTPVPKGKSP

SEQ ID NO: 498 - protein, 57 aa, Homo sapiens; identical to SEQ ID NO: 497

SEQ ID NO: 499 - protein, 49 aa, Pan troglodytes
FISNDECPSEYYYHCRLKCNADEHAIRYCADFSICCKLKIIEIHGQKKW

SEQ ID NO: 500 - protein, 48 aa, Homo sapiens
FISNDECPSEYYHCRLKCNADEHAIRYCADFSICCKLKIIEIDGQKKW

SEQ ID NO: 501 - protein, 73 aa, Pongo pygmaeus
GGSKCVSNTPGYCRTYCHQGETALFMCNASRKCCVSYSFLPKPDLPQLIGNHWQSRRRNTQRKDKKQQTTVTS

SEQ ID NO: 502 - protein, 73 aa, Pan troglodytes
GGSKCVSNTPGYCRTYCHWGETALFMCNASRKCCVSYSFLPKADLPRLIGNHWQSRRRNTQRKDKKQQTTVTS

SEQ ID NO: 503 - protein, 73 aa, Macaca fascicularis
GGSKCVSDTPGYCRTHCHRGETALFMCSPFRKCCISYSFLPQPDLPQLIGNHWPSRSRNTQRKNKKQQTTVTP

SEQ ID NO: 504 - protein, 74 aa, Hylobates lar
GGSKCVSDTQGYCRTYCHQGETALFMCNASRKCCASYSFLPKPDLPQLIGNHWQSRRRNTQRKDKKQQTTVTSS

SEQ ID NO: 505 - protein, 72 aa, Gorilla gorilla
  Gorilla gorilla gorilla
GGSKCVSNTPAYCRTYCHWGETALFMFNASRKCCISYSFLPKPDLPQLIGNHWQSRRNTQRKDKKQQTTVTS

SEQ ID NO: 506 - protein, 73 aa, Homo sapiens
GGSKCVSNTPGYCRTCCHWGETALFMCNASRKCCISYSFLPKPDLPQLIGNHWQSRRRNTQRKDKKQQTTVTS

SEQ ID NO: 507 - protein, 41 aa, Pan troglodytes
VKCAVKDTYSCFIVRGKCRHECHDFEKPIGFCTKLNANCYM

SEQ ID NO: 508 - protein, 38 aa, Homo sapiens
AVKDTYSCFIMRGKCRHECHDFEKPIGFCTKLNANCYM

SEQ ID NO: 509 - protein, 40 aa, Pan troglodytes
EMHKKCYKNGICRLECYESEMLVAYCMFQLECCVKGNPAP

SEQ ID NO: 510 - protein, 47 aa, Homo sapiens
GINSLSSEMHKKCYKNGICRLECYESEMLVAYCMFQLECCVKGNPAP

SEQ ID NO: 511 - protein, 54 aa, Pan troglodytes
GPNVYIQKIFASCWRLQGTCRPKCLKNETISYFGVILYICGCVNPKYLPILTGK

SEQ ID NO: 512 - protein, 53 aa, Homo sapiens
GPNVYIQKIFASCWRLQGTCRPKCLKNEQYRILCDTIHLCCVNPKYLPILTGK

SEQ ID NO: 513 - protein, 57 aa, Pan troglodytes
MFGNDGVKVRTCTSQKAVCFFGCPPGYRWIAFCHNILSCCKNMTRFQPLQAKDPWVH

SEQ ID NO: 514 - protein, 57 aa, Homo sapiens
MFGNDGVKVRTCTSQKAVCFFGCPPGYRWIAFCHNILSCCKNMTRFQPPQAKDPWVH

SEQ ID NO: 515 - protein, 45 aa, Rattus norvegicus
FIPKSLRRFFCRVRGGRCAILNCLGKEEQIGRCSNRGQKCCRKKK

SEQ ID NO: 516 - protein, 46 aa, Mus musculus
KKSYPEYGSLDLRKECKMRRGHCKLQCSEKELRISFCIRPGTHCCM

SEQ ID NO: 517 - protein, 62 aa, Rattus norvegicus
APQMKTRDVLERTHKCFLVGGECKSECSSWEYEYVFCYTGPCCVMREYKRVEKFSNTPKYTT

SEQ ID NO: 518 - protein, 62 aa, Mus musculus
APQMKTREVAERTHKCSLVRGTCKSECNSWEYKYNYCHTEPCCVVREYKRMEKLLSTPKYTT

SEQ ID NO: 519 - protein, 41 aa, Rattus norvegicus
KKVYNAVSCMTNGGICWLKCSGTFREIGSCGTRQLKCCKKK

SEQ ID NO: 520 - protein, 45 aa, Homo sapiens; identical to SEQ ID NO: 430

SEQ ID NO: 521 - protein, 40 aa, Mus musculus
EIAVCETCRLGRGKCRRACIESEKIVGWCKLNFFCCRERI

SEQ ID NO: 522 - protein, 79 aa, Tachypleus tridentatus
NPLIPAIYIGATVGPSVWAYLVALVGAAAVTAANIRRASSDNHSCAGNRGWCRSKCFRHEYVDTYYSAVCGRYFCCRSR

SEQ ID NO: 523 - protein, 18 aa, Mesobuthus martensii
FLFSLIPSAISGLISAFK

SEQ ID NO: 524 - protein, 13 aa, Mesobuthus martensii
FIGAVAGLLSKIF

SEQ ID NO: 525 - protein, 13 aa, Mesobuthus martensii
FIGAIARLLSKIF

SEQ ID NO: 526 - protein, 17 aa, Bombina orientalis
ILGPILGLVSNALGGLL

SEQ ID NO: 527 - protein, 21 aa, Bombina variegata
IIGPVLGMVGSALGGLLKKIG

SEQ ID NO: 528 - protein, 21 aa, Bombina variegata
LIGPVLGLVGSALGGLLKKIG

SEQ ID NO: 529 - protein, 20 aa, Bombina variegata
IIGPVLGLVGSALGGLLKKI

SEQ ID NO: 530 - protein, 27 aa, Bombina variegata
GIGGALLSAAKVGLKGLAKGLAEHFAN

SEQ ID NO: 531 - protein, 27 aa, Bombina orientalis
GIGSAILSAGKSALKGLAKGLAEHFAN

SEQ ID NO: 532 - protein, 25 aa, Bombina orientalis
GIGAAILSAGKSIIKGLANGLAEHF

SEQ ID NO: 533 - protein, 27 aa, Bombina orientalis
GIGGALLSAGKSALKGLAKGLAEHFAN

SEQ ID NO: 534 - protein, 27 aa, Bombina orientalis
GIGASILSAGKSALKGLAKGLAEHFAN

SEQ ID NO: 535 - protein, 25 aa, Bombina orientalis
GIGAAILSAGKSALKGLAKGLAEHF

SEQ ID NO: 536 - protein, 117 aa, Mus musculus
TCRYLLVRRAECFDKAQSVCRRCYRGTLASIHSFSVNFGIQSAVRGINQGQVWIGGRIKGWGRCKRFRWVDGSSWNFAYWAAGQPCPGGGRCVTLCTQGGHWRLSHCVKRRPFICSY

SEQ ID NO: 537 - protein, 117 aa, Rattus norvegicus
TGRYLLVRRPECFNKAQLVCRSCYRGTLASIHSFSVNFRIQSFVRGINQGQVWIGGRIVGWGRCKRFRWIDGSSWNFAYWAAGQPRRGGGRCVTLCTRGGHWRRSGCGKRRPFICAY

SEQ ID NO: 538 - protein, 206 aa, Homo sapiens [sequence omitted]

SEQ ID NO: 539 - protein, 33 aa, Pelophylax ridibundus
GIMDTLKNLAKTAGKGALQSLVKMASCKLSGQC

SEQ ID NO: 540 - protein, 24 aa, Odorrana grahami
FLPLLAGLAANFLPKIFCKITKKC

SEQ ID NO: 541 - protein, 33 aa, Odorrana grahami
GLLDTFKNLALNAAKSAGVSVLNSLSCKLSKTC

SEQ ID NO: 542 - protein, 37 aa, Odorrana grahami
GLFTLIKGAAKLIGKTVAKEAGKTGLELMACKITNQC

SEQ ID NO: 543 - protein, 33 aa, Rana temporaria
GILDTLKNLAKTAGKGILKSLVNTASCKLSGQC

SEQ ID NO: 544 - protein, 24 aa, Pelophylax porosus
  Rana porosa brevipoda
FLPVLAGIAAKVVPALFCKITKKC

SEQ ID NO: 545 - protein, 24 aa, Rana berlandieri
FLPFIAGMAAKFLPKIFCAISKKC

SEQ ID NO: 546 - protein, 24 aa, Rana berlandieri
FLPAIAGMAAKFLPKIFCAISKKC

SEQ ID NO: 547 - protein, 24 aa, Rana berlandieri
FLPFIAGVAAKFLPKIFCAISKKC

SEQ ID NO: 548 - protein, 24 aa, Rana berlandieri
FLPAIAGVAAKFLPKIFCAISKKC

SEQ ID NO: 549 - protein, 24 aa, Rana berlandieri
FLPAIVGAAAKFLPKIFCVISKKC

SEQ ID NO: 550 - protein, 24 aa, Rana berlandieri
FLPFIAGMAANFLPKIFCAISKKC

SEQ ID NO: 551 - protein, 24 aa, Rana boylii
FLPILASLAAKFGPKLFCLVTKKC

SEQ ID NO: 552 - protein, 24 aa, Rana boylii
FLPILASLAAKLGPKLFCLVTKKC

SEQ ID NO: 553 - protein, 24 aa, Rana boylii
FLPILASLAATLGPKLLCLITKKC

SEQ ID NO: 554 - protein, 24 aa, Rana cascadae
FLPILAGLAAKIVPKLFCLATKKC

SEQ ID NO: 555 - protein, 20 aa, Rana dybowskii
FLSLALAALPKFLCLVFKKC

SEQ ID NO: 556 - protein, 20 aa, Rana dybowskii
FLSLALAALPKLFCLIFKKC

SEQ ID NO: 557 - protein, 20 aa, Rana dybowskii
FLPLLLAGLPKLLCLFFKKC

SEQ ID NO: 558 - protein, 17 aa, Rana dybowskii
FLIGMTHGLICLISRKC

SEQ ID NO: 559 - protein, 17 aa, Rana dybowskii
FLIGMTQGLICLITRKC

SEQ ID NO: 560 - protein, 24 aa, Pelophylax esculentus
FLPLLAGLAANFLPKIFCKITRKC

SEQ ID NO: 561 - protein, 24 aa, Pelophylax ridibundus
FLPLLAGLAANFLPKIFCKITRKC

SEQ ID NO: 562 - protein, 24 aa, Pelophylax esculentus
FLPAIFRMAAKVVPTIICSITKKC

SEQ ID NO: 563 - protein, 24 aa, Pelophylax esculentus
VIPFVASVAAEMMPHVYCAASRKC

SEQ ID NO: 564 - protein, 24 aa, Pelophylax esculentus
FLPLLAGLAANFFPKIFCKITRKC

SEQ ID NO: 565 - protein, 24 aa, Pelophylax ridibundus
FLPLLAGLAANFFPKIFCKITRKC

SEQ ID NO: 566 - protein, 24 aa, Odorrana hosii
FLPAVLRVAAKIVPTVFCAISKKC

SEQ ID NO: 567 - protein, 24 aa, Odorrana hosii
FLPAVLRVAAQVVPTVFCAISKKC

SEQ ID NO: 568 - protein, 24 aa, Rana luteiventris
FLPMLAGLAASMVPKLVCLITKKC

SEQ ID NO: 569 - protein, 24 aa, Rana luteiventris
FLPMLAGLAASMVPKFVCLITKKC

SEQ ID NO: 570 - protein, 24 aa, Rana pipiens
FLPIIAGVAAKVFPKIFCAISKKC

SEQ ID NO: 571 - protein, 24 aa, Rana pipiens
FLPIIAGIAAKVFPKIFCAISKKC

SEQ ID NO: 572 - protein, 24 aa, Rana pipiens
FLPIIASVAAKVFSKIFCAISKKC

SEQ ID NO: 573 - protein, 24 aa, Rana pipiens
FLPIIASVAANVFSKIFCAISKKC

SEQ ID NO: 574 - protein, 24 aa, Rana pipiens
FLPIIASVAAKVFPKIFCAISKKC

SEQ ID NO: 575 - protein, 24 aa, Hylarana picturata
FMGGLIKAATKIVPAAYCAITKKC

SEQ ID NO: 576 - protein, 24 aa, Hylarana picturata
FMGGLIKAATKALPAAFCAITKKC

SEQ ID NO: 577 - protein, 24 aa, Rana sylvatica
FLPVVAGLAAKVLPSIICAVTKKC

SEQ ID NO: 578 - protein, 24 aa, Rana sphenocephala
FLPAIVGAAGQFLPKIFCAISKKC

SEQ ID NO: 579 - protein, 24 aa, Rana sphenocephala
FLPAIVGAAGKFLPKIFCAISKKC

SEQ ID NO: 580 - protein, 24 aa, Rana sphenocephala
FFPIVAGVAGQVLKKIYCTISKKC

SEQ ID NO: 581 - protein, 23 aa, Rana sevosa
FLPLVRGAAKLIPSVVCAISKRC

SEQ ID NO: 582 - protein, 20 aa, Rana temporaria
VNPIILGVLPKFVCLITKKC

SEQ ID NO: 583 - protein, 17 aa, Rana temporaria
FITLLLRKFICSITKKC

SEQ ID NO: 584 - protein, 22 aa, Rana tsushimensis
FLGSIVGALASALPSLISKIRN

SEQ ID NO: 585 - protein, 33 aa, Pelophylax porosus
  Rana porosa brevipoda
GLLDSLKGFAATAGKGVLQSLLSTASCKLAKTC

SEQ ID NO: 586 - protein, 33 aa, Rana dybowskii
GLLSAVKGVLKGAGKNVAGSLMDKLKCKLFGGC

SEQ ID NO: 587 - protein, 33 aa, Rana dybowskii
GLFDVVKGVLKGAGKNVAGSLLEQLKCKLSGGC

SEQ ID NO: 588 - protein, 33 aa, Rana dybowskii
GIFDVVKGVLKGVGKNVAGSLLEQLKCKLSGGC

SEQ ID NO: 589 - protein, 37 aa, Rana dybowskii
GLFSVVTGVLKAVGKNVAKNVGGSLLEQLKCKISGGC

SEQ ID NO: 590 - protein, 33 aa, Pelophylax esculentus
GIMDTLKNLAKTAGKGALQSLLNKASCKLSGQC

SEQ ID NO: 591 - protein, 33 aa, Pelophylax esculentus
GILDTLKNLAISAAKGAAQGLVNKASCKLSGQC

SEQ ID NO: 592 - protein, 33 aa, Pelophylax esculentus
GILDTLKNLAKTAGKGALQGLVKMASCKLSGQC

SEQ ID NO: 593 - protein, 34 aa, Pelophylax esculentus
GILLDKLKNFAKTAGKGVLQSLLNTASCKLSGQC

SEQ ID NO: 594 - protein, 34 aa, Pelophylax ridibundus; identical to SEQ ID NO: 593

SEQ ID NO: 595 - protein, 29 aa, Pelophylax esculentus
GILDSLKNLAKNAGQILLNKASCKLSGQC

SEQ ID NO: 596 - protein, 29 aa, Pelophylax esculentus
GIFDKLKNFAKGVAQSLLNKASCKLSGQC

SEQ ID NO: 597 - protein, 33 aa, Pelophylax esculentus; identical to SEQ ID NO: 539

SEQ ID NO: 598 - protein, 33 aa, Pelophylax ridibundus
GIMDTLKNLAKTAGKGALQSLLNHASCKLSGQC

SEQ ID NO: 599 - protein, 30 aa, Pelophylax ridibundus
GIFLDKLKNFAKGVAQSLLNKASCKLSGQC

SEQ ID NO: 600 - protein, 34 aa, Hylarana guentheri
GFSSLFKAGAKYLLKSVGKAGAQQLACKAANNCA

SEQ ID NO: 601 - protein, 30 aa, Hylarana guentheri
GVITDALKGAAKTVAAELLRKAHCKLTNSC

SEQ ID NO: 602 - protein, 31 aa, Hylarana guentheri
SIWEGIKNAGKGFLVSILDKVRCKVAGGCNP

SEQ ID NO: 603 - protein, 33 aa, Odorrana hosii
GLLDSLKNLAINAAKGAGQSVLNTLSCKLSKTC

SEQ ID NO: 604 - protein, 33 aa, Odorrana hosii
GLLDTLKNMAINAAKGAGQSVLNTLSCKLSKTC

SEQ ID NO: 605 - protein, 30 aa, Hylarana picturata
GAIKDALKGAAKTVAVELLKKAQCKLEKTC

SEQ ID NO: 606 - protein, 33 aa, Hylarana picturata
GFKGAFKNVMFGIAKSAGKSALNALACKIDKSC

SEQ ID NO: 607 - protein, 33 aa, Hylarana picturata
GLLDSFKNAMIGIAKSAGKTALNKIACKIDKTC

SEQ ID NO: 608 - protein, 33 aa, Hylarana picturata
GFLDSFKNAMIGVAKSAGKTALNTLACKIDKTC

SEQ ID NO: 609 - protein, 33 aa, Hylarana picturata
GFLDSFKNAMIGVAKSVGKTALSTLACKIDKSC

SEQ ID NO: 610 - protein, 17 aa, Rana sakuraii
FLPVILPVIGKLLNGIL

SEQ ID NO: 611 - protein, 33 aa, Rana sakuraii
GLFNVFKKVGKNVLKNVAGSLMDNLKCKVSGEC

SEQ ID NO: 612 - protein, 33 aa, Rana temporaria
GILDTLKHLAKTAGKGALQSLLNHASCKLSGQC

SEQ ID NO: 613 - protein, 29 aa, Rana temporaria
GLWETIKNFGKKFTLNILHKLKCKIGGGC

SEQ ID NO: 614 - protein, 29 aa, Rana temporaria
GLWETIKNFGKKFTLNILHNLKCKIGGGC

SEQ ID NO: 615 - protein, 33 aa, Rana tsushimensis
GIMSLFKGVLKTAGKHVAGSLVDQLKCKITGGC

SEQ ID NO: 616 - protein, 39 aa, Bufo gargarizans
AGRGKQGGKVRAKAKTRSSRAGLQFPVGRVHRLLRKGNY

SEQ ID NO: 617 - protein, 21 aa, Bufo gargarizans
TRSSRAGLQFPVGRVHRLLRK

SEQ ID NO: 618 - protein, 34 aa, Androctonus australis
SIVPIRCRSNRDCRRFCGFRGGRCTYARQCLCGY

SEQ ID NO: 619 - protein, 15 aa, Artificial Sequence
  Description of Artificial Sequence: Synthetic Anti-viral polypeptide
KWKLFKKIGAVLKVL

SEQ ID NO: 620 - protein, 15 aa, Artificial Sequence
  Description of Artificial Sequence: Synthetic Anti-viral polypeptide
KWKLFKKGAVLKVLT

SEQ ID NO: 621 - protein, 15 aa, Artificial Sequence
  Description of Artificial Sequence: Synthetic Anti-viral polypeptide
KWKLFKKAVLKVLTT

SEQ ID NO: 622 - protein, 15 aa, Artificial Sequence
  Description of Artificial Sequence: Synthetic Anti-viral polypeptide
KWKLFKKVLKVLTTG

SEQ ID NO: 623 - protein, 15 aa, Artificial Sequence
  Description of Artificial Sequence: Synthetic Anti-viral polypeptide
KWKLFKKLKVLTTGL

SEQ ID NO: 624 - protein, 15 aa, Artificial Sequence
  Description of Artificial Sequence: Synthetic Anti-viral polypeptide
KWKLFKKGIGAVLKV

SEQ ID NO: 625 - protein, 18 aa, Artificial Sequence
  Description of Artificial Sequence: Synthetic Anti-viral polypeptide
KWKLFKKIGIGAVLKVLT

SEQ ID NO: 626 - protein, 20 aa, Artificial Sequence
  Description of Artificial Sequence: Synthetic Anti-viral polypeptide
KWKLFKKIGIGAVLKVLTTG

SEQ ID NO: 627 - protein, 26 aa, Artificial Sequence
  Description of Artificial Sequence: Synthetic Anti-viral polypeptide
KWKLFKKIGIGAVLKVLTTGLPALIS

SEQ ID NO: 628 - protein, 26 aa, Litoria caerulea
GLFSVLGSVAKHVVPRVVPVIAEHLG

SEQ ID NO: 629 - protein, 25 aa, Litoria caerulea
GLFGILGSVAKHVLPHVVPVIAEHS

SEQ ID NO: 630 - protein, 24 aa, Litoria caerulea
GLLSVLGSLKLIVPHVVPLIAEHL

SEQ ID NO: 631 - protein, 22 aa, Litoria caerulea
SVLGKSVAKHLPHVVPVIAEKT

SEQ ID NO: 632 - protein, 23 aa, Litoria caerulea
GLFGLAKGSVAKPHVVPVISQLV

SEQ ID NO: 633 - protein, 25 aa, Litoria splendida
GLFSVLGAVAKHVLPHVVPVIAEKL

SEQ ID NO: 634 - protein, 25 aa, Litoria splendida
GLLSVLGSVAKHVLPHVVPVIAEKL

SEQ ID NO: 635 - protein, 25 aa, Litoria gracilenta
GLFSVLGSVAKHLLPHVAPIIAEKL

SEQ ID NO: 636 - protein, 25 aa, Litoria gracilenta
GLFSVLGSVAKHLLPHVVPVIAEKL

SEQ ID NO: 637 - protein, 25 aa, Litoria gracilenta
GLFKVLGSVAKHLLPHVAPIIAEKL

SEQ ID NO: 638 - protein, 25 aa, Litoria caerulea
GLLGVLGSVAKHVLPHVVPVIAEHL

SEQ ID NO: 639 - protein, 25 aa, Litoria caerulea
GLLSVLGSVAQHVLPHVVPVIAEHL

SEQ ID NO: 640 - protein, 25 aa, Litoria gilleni
GLLSSLSSVAKHVLPHVVPVIAEHL

SEQ ID NO: 641 - protein, 25 aa, Litoria caerulea
GLLSSLSSVAKHVLPHVVPVIAEHL

SEQ ID NO: 642 - protein, 25 aa, Litoria caerulea
GLLSVLGSVVKHVIPHVVPVIAEHL

SEQ ID NO: 643 - protein, 25 aa, Litoria xanthomera
GLFSVLGAVAKHVLPHVVPVIAEKL

SEQ ID NO: 644 - protein, 24 aa, Litoria chloris
GLFSVLGAVAKHVLPHVVPVIAEK

SEQ ID NO: 645 - protein, 25 aa, Litoria xanthomera
GLFKVLGSVAKHLLPHVAPVIAEKL

SEQ ID NO: 646 - protein, 24 aa, Litoria chloris
GLFKVLGSVAKHLLPHVAPVIAEK

SEQ ID NO: 647 - protein, 24 aa, Litoria chloris
GLFKVLGSVAKHLLPHVVPVIAEK

SEQ ID NO: 648 - protein, 25 aa, Litoria chloris
GLFGVLGSIAKHVLPHVVPVIAEKL

SEQ ID NO: 649 - protein, 25 aa, Litoria splendida
GLVSSIGRALGGLLADVVKSKGQPA

SEQ ID NO: 650 - protein, 17 aa, Litoria caerulea
ALGGLLADVVKSKEQPA

SEQ ID NO: 651 - protein, 25 aa, Litoria caerulea
GLVSSIGKALGGLLADVVKTKEQPA

SEQ ID NO: 652 - protein, 25 aa, Litoria gilleni
GLVASIGRALGGLLADVVKSKEQPA

SEQ ID NO: 653 - protein, 22 aa, Litoria splendida
GLWQKIKDKASELVSGIVEGVK

SEQ ID NO: 654 - protein, 22 aa, Litoria gilleni
GLWQKIKDKASELVSGIVEGVK

SEQ ID NO: 655 - protein, 22 aa, Litoria caerulea
GLWEKIKEKASELVSGIVEGVK

SEQ ID NO: 656 - protein, 22 aa, Litoria caerulea
GLWEKIKEKANELVSGIVEGVK

SEQ ID NO: 657 - protein, 22 aa, Litoria caerulea
GLWEKIREKANELVSGIVEGVK

SEQ ID NO: 658 - protein, 22 aa, Litoria gracilenta
GLWEKVKEKANELVSGIVEGVK

SEQ ID NO: 659 - protein, 23 aa, Litoria caerulea
GLWQKIKSAAGDLASGIVEGIKS

SEQ ID NO: 660 - protein, 23 aa, Litoria caerulea
GLWQKIKSAAGDLASGIVEAIKS

SEQ ID NO: 661 - protein, 23 aa, Litoria caerulea
GLWQKIKNAAGDLASGIVEGIKS

SEQ ID NO: 662 - protein, 15 aa, Homo sapiens
VAIALKAAHYHTHKE

SEQ ID NO: 663 - protein, 48 aa, Bos taurus
SDEKASPDRHHRFSLSRYAKLANRLSKWIGNRGNRLANPKLLETFKSV

SEQ ID NO: 664 - protein, 34 aa, Canis lupus
  Canis lupus familiaris
KCWNLRGSCREKCIKNEKLYIFCTSGKLCCLKPK

SEQ ID NO: 665 - protein, 60 aa, Carnobacterium maltaromaticum
LVAYGIAQGTAEKVVSLINAGLTVGSIISILGGVTVGLSGVFTAVKAAIAKQGIKKAIQL

SEQ ID NO: 666 - protein, 545 aa, Ricinus communis
STTHQEVRPLAYFPPTVWGNRFASLTFNPSEFESYDERVIVLKKKVKDILISSTSDSVETVILIDLLCRLGVSYHFENDIEELLSKIFNSQPDLVDEKECDLYTAAIVFRVFRQHGFKMSSDVFSKFKDSDGKFKESLRGDAKGMLSLFEASHLSVHGEDILEEAFAFTKDYLQSSAVELFPNLKRHITNALEQPFHSGVPRLEARKFIDLYEADIECRNETLLEFAKLDYNRVQLLHQQELCQFSKWWKDLNLASDIPYARDRMAEIFFWAVAMYFEPDYAHTRMIIAKVVLLISLIDDTIDAYATMEETHILAEAVARWDMSCLEKLPDYMKVIYKLLLNTFSEFEKELTAEGKSYSVKYGREAFQELVRGYYLEAVWRDEGKIPSFDDYLYNGSMTTGLPLVSTASFMGVQEITGLNEFQWLETNPKLSYASGAFIRLVNDLTSHVTEQQRGHVASCIDCYMNQHGVSKDEAVKILQKMATDCWKEINEECMRQSQVSVGHLMRIVNLARLTDVSYKYGDGYTDSQQLKQFVKGLFVDPISI

SEQ ID NO: 667 - protein, 39 aa, Bos taurus
KTKLTEEEKNRLNFLKKISQRYQKFALPQYLKTVYQHQK

SEQ ID NO: 668 - protein, 66 aa, Ovis aries
SYREAVLRAVDQFNERSAEANLYRLLELDPPPEQDAEDRGARKPVSFKVKETVCPRTSQQPVEQCD

SEQ ID NO: 669 - protein, 38 aa, Canis lupus
  Canis lupus familiaris
RLKELITTGGQKIGEKIRRIGQRIKDFFKNLQPREEKS

SEQ ID NO: 670 - protein, 26 aa, Gallus gallus
RVKRVWPLVIRTVIAGYNLYRAIKKK

SEQ ID NO: 671 - protein, 37 aa, Homo sapiens; identical to SEQ ID NO: 4

SEQ ID NO: 672 - protein, 26 aa, Bos taurus
QCVGTITLDQSDDLFDLNCNELQSVR

SEQ ID NO: 673 - protein, 26 aa, Capra hircus
RFRLPFRRPPIRIHPPPFYPPFRRFL

SEQ ID NO: 674 - protein, 28 aa, Bos taurus
GGLRSLGRKILRAWKKYGPIIVPIIRIG

SEQ ID NO: 675 - protein, 40 aa, Gallus gallus
PIRNWWIRIWEWLNGIRKRLRQRSPFYVRGHLNVTSTPQP

SEQ ID NO: 676 - protein, 30 aa, Bungarus fasciatus
KFFRKLKKSVKKRAKEFFKKPRVIGVSIPF

SEQ ID NO: 677 - protein, 15 aa, Bungarus fasciatus
KFFRKLKKSVKKRAK

SEQ ID NO: 678 - protein, 42 aa, Chinchilla lanigera
AKRGGFWRKVGRKLGKGIRKIGKTIKSQLGKFRPRLQYRYQF

SEQ ID NO: 679 - protein, 33 aa, Mus musculus
GLLRKGGEKIGEKLKKIGQKIKNFFQKLVPQPE

SEQ ID NO: 680 - protein, 38 aa, Mus musculus
ISRLAGLLRKGGEKIGEKLKKIGQKIKNFFQKLVPQPE

SEQ ID NO: 681 - protein, 222 aa, Homo sapiens
IVGGRKARPRQFPFLASIQNQGRHFCGGALIHARFVMTAASCFQSQNPGVSTVVLGAYDLRRRERQSRQTFSISSMSENGYDPQQNLNDLMLLQLDREANLTSSVTILPLPLQNATVEAGTRCQVAGWGSQRSGGRLSRFPRFVNVTVTPEDQCRPNNVCTGVLTRRGGICNGDGGTPLVCEGLAHGVASFSLGPCGRGPDFFTRVALFRDWIDGVLNNPGP

SEQ ID NO: 682 - protein, 39 aa, Drosophila virilis
GWLKKIGKKIERIGQHTRDATIQGLGIAQQAANVAATAR

SEQ ID NO: 683 - protein, 39 aa, Drosophila virilis
GWLKKIGKKIERVGQHTRDATIQGLGIAQQAANVAATAR

SEQ ID NO: 684 - protein, 39 aa, Drosophila virilis
GWLKKIGKKIERIGQHTRDATIQGVGIAQQAANVAATAR

SEQ ID NO: 685 - protein, 35 aa, Bombyx mori
RWKIFKKIEKVGQNIRDGIVKAGPAVAVVGQAATI

SEQ ID NO: 686 - protein, 39 aa, Drosophila sechellia
GWLKKIGKKIERVGQHTRDATIQGLGVAQQAANVAATAR

SEQ ID NO: 687 - protein, 43 aa, Drosophila simulans
QSEAGWLKKIGKKIERVGQHTRDATIQGLGVAQQAPNVAATAR

SEQ ID NO: 688 - protein, 55 aa, Drosophila yakuba
VFVALILAIAIGQSEAGWLKKIGKKIERVGQHTRDATIQGLGIAQQAANVAATAR

SEQ ID NO: 689 - protein, 40 aa, Drosophila sechellia
AGWLRKLGKKIERIGQHTRDASIQVLGIAQQAANVAATAR

SEQ ID NO: 690 - protein, 39 aa, Drosophila orena
GWLKKLGKRIERIGQHTRDATIQGLGIAQQAANVAATAR

SEQ ID NO: 691 - protein, 39 aa, Drosophila simulans; identical to SEQ ID NO: 690

SEQ ID NO: 692 - protein, 39 aa, Drosophila teissieri; identical to SEQ ID NO: 690

SEQ ID NO: 693 - protein, 39 aa, Drosophila takahashii; identical to SEQ ID NO: 690

SEQ ID NO: 694 - protein, 36 aa, Bombyx mori
GNFFKDLEKMGQRVRDAVISAAPAVDTLAKAKALGQ

SEQ ID NO: 695 - protein, 37 aa, Bombyx mori
PWNIFKEIERAVARTRDAVISAGPAVRTVAAATSVAS

SEQ ID NO: 696 - protein, 39 aa, Glossina morsitans
  Glossina morsitans morsitans
GWLKKIGKKIERVGQNTRDATVKGLEVAQQAANVAATVR

SEQ ID NO: 697 - protein, 32 aa, Oiketicus kirbyi
WKPFKKIEKAVRRVRDGVAKAGPAVAVVGQAT

SEQ ID NO: 698 - protein, 35 aa, Bombyx mori
RWKLFKKIEKVGRNVRDGLIKAGPAIAVIGQAKSL

SEQ ID NO: 699 - protein, 35 aa, Bombyx mori
RWKIFKKIEKMGRNIRDGIVKAGPAIEVLGSAKAI

SEQ ID NO: 700 - protein, 31 aa, Ascaris suum
SWLSKTAKKLENSAKKRISEGIAIAIQGGPR

SEQ ID NO: 701 - protein, 39 aa, Ceratitis capitata
GWLKKIGKKIERVGQHTRDATIQTIAVAQQAANVAATAR

SEQ ID NO: 702 - protein, 39 aa, Ceratitis capitata
GWLKKIGKKIERVGQHTRDATIQTIGVAQQAANVAATLK

SEQ ID NO: 703 - protein, 36 aa, Spodoptera litura
RWKVFKKIEKVGRNVRDGIIKAGPAIGVLGQAKALG

SEQ ID NO: 704 - protein, 34 aa, Culex pipiens
  Culex pipiens pipiens
GGLKKFGKKLEGVGKRVFKASEKALPVVTGFKAL

SEQ ID NO: 705 - protein, 36 aa, Trichoplusia ni
RWKFFKKIEKVGQNIRDGIIKAGPAVAVVGQAASIT

SEQ ID NO: 706 - protein, 35 aa, Heliothis virescens
RWKVFKKIEKVGRNIRDGVIKAAPAIEVLGQAKAL

SEQ ID NO: 707 - protein, 34 aa, Aedes aegypti
GGLKKLGKKLEGAGKRVFNAAEKALPVVAGAKAL

SEQ ID NO: 708 - protein, 37 aa, Hyalophora cecropia
KWKLFKKIEKVGQNIRDGIIKAGPAVAVVGQATQIAK

SEQ ID NO: 709 - protein, 35 aa, Anopheles gambiae
GRLKKLGKKIEGAGKRVFKAAEKALPVVAGVKALG

SEQ ID NO: 710 - protein, 39 aa, Drosophila mauritiana; identical to SEQ ID NO: 686

SEQ ID NO: 711 - protein, 35 aa, Aedes albopictus
GGLKKLGKKLEGVGKRVFKASEKALPVAVGIKALG

SEQ ID NO: 712 - protein, 40 aa, Drosophila melanogaster
GWLKKIGKKIERVGQHTRDATIQGLGIAQQAANVAATARG

SEQ ID NO: 713 - protein, 35 aa, Aedes albopictus
GGLKKFGKKLEGVGKRVFKASEKALPVAVGIKALG

SEQ ID NO: 714 - protein, 35 aa, Antheraea pernyi
KWKIFKKIEKVGRNIRNGIIKAGPAVAVLGEAKAL

SEQ ID NO: 715 - protein, 35 aa, Hyalophora cecropia
KWKVFKKIEKMGRNIRNGIVKAGPAIAVLGEAKAL

SEQ ID NO: 716 - protein, 39 aa, Drosophila melanogaster
GWLRKLGKKIERIGQHTRDASIQVLGIAQQAANVAATAR

SEQ ID NO: 717 - protein, 37 aa, Spodoptera litura
RWKVFKKIEKMGRNIRDGIVKAGPAIEVLGSAKALGK

SEQ ID NO: 718 - protein, 40 aa, Drosophila simulans; identical to SEQ ID NO: 689

SEQ ID NO: 719 - protein, 40 aa, Drosophila mauritiana; identical to SEQ ID NO: 689

SEQ ID NO: 720 - protein, 34 aa, Anopheles gambiae
APRWKFGKRLEKLGRNVFRAAKKALPVIAGYKAL

SEQ ID NO: 721 - protein, 35 aa, Bombyx mori; identical to SEQ ID NO: 699

SEQ ID NO: 722 - protein, 33 aa, Heliothis virescens
KWKVFKKIEKVGRNIRDGIVKAGPAIAVLGQAN

SEQ ID NO: 723 - protein, 34 aa, Culex pipiens
  Culex pipiens pipiens
GRLKKLGKKIEKAGKRVFNAVQKGLPVAAGVQAL

SEQ ID NO: 724 - protein, 34 aa, Culex pipiens
  Culex pipiens pipiens
GRSKKLGKKIEKAGKRVFNAAQKGLPVAAGVQAL

SEQ ID NO: 725 - protein, 39 aa, Drosophila erecta; identical to SEQ ID NO: 690

SEQ ID NO: 726 - protein, 35 aa, Anopheles gambiae
RRFKKFLKKVEGAGRRVANAAQKGLPLAAGVKGLV

SEQ ID NO: 727 - protein, 39 aa, Drosophila sechellia; identical to SEQ ID NO: 690

SEQ ID NO: 728 - protein, 39 aa, Drosophila mauritiana; identical to SEQ ID NO: 690

SEQ ID NO: 729 - protein, 39 aa, Drosophila yakuba; identical to SEQ ID NO: 690

SEQ ID NO: 730 - protein, 33 aa, Heliothis virescens
RWKVFKKIEKMGRNIRDGVIKAAPAIEVLGQAK

SEQ ID NO: 731 - protein, 40 aa, Drosophila melanogaster
GWLKKLGKRIERIGQHTRDATIQGLGIAQQAANVAATARG

SEQ ID NO: 732 - protein, 35 aa, Aedes albopictus
GGLKKLGKKLEGAGKRVFNAAEKALPVVAGAKALG

SEQ ID NO: 733 - protein, 36 aa, Antheraea pernyi
WNPFKELERAGQRVRDAIISAGPAVATVAQATALAK

SEQ ID NO: 734 - protein, 36 aa, Hyalophora cecropia
WNPFKELEKVGQRVRDAVISAGPAVATVAQATALAK

SEQ ID NO: 735 - protein, 39 aa, Galleria mellonella
ENFFKEIERAGQRIRDAIISAAPAVETLAQAQKIIKGGD

SEQ ID NO: 736 - protein, 31 aa, Sus scrofa; identical to SEQ ID NO: 700

SEQ ID NO: 737 - protein, 29 aa, Ceratitis capitata
SIGSALKKALPVAKKIGKIALPIAKAALP

SEQ ID NO: 738 - protein, 29 aa, Ceratitis capitata
SIGSAFKKALPVAKKIGKAALPIAKAALP

SEQ ID NO: 739 - protein, 32 aa, Ceratitis capitata
SLGGVISGAKKVAKVAIPIGKAVLPVVAKLVG

SEQ ID NO: 740 - protein, 36 aa, Ceratitis capitata
SIGTAVKKAVPIAKKVGKVAIPIAKAVLSVVGQLVG

SEQ ID NO: 741 - protein, 20 aa, Xenopus laevis
KAKLFKKIGIGKFLHSAKKF

SEQ ID NO: 742 - protein, 20 aa, Xenopus laevis
KWKLFKKIGIGKFLHSAKKF

SEQ ID NO: 743 - protein, 20 aa, Xenopus laevis
KLKLFKKIGIGKFLHSAKKF

SEQ ID NO: 744 - protein, 18 aa, Xenopus laevis
KWKLFKKIPKFLHSAKKF

SEQ ID NO: 745 - protein, 15 aa, Artificial Sequence
  Description of Artificial Sequence: Synthetic Anti-viral polypeptide
RRRFPWVCWPFLRRR

SEQ ID NO: 746 - protein, 10 aa, Artificial Sequence
  Description of Artificial Sequence: Synthetic Anti-viral polypeptide
RFPWWWPFLR

SEQ ID NO: 747 - protein, 7 aa, Artificial Sequence
  Description of Artificial Sequence: Synthetic Anti-viral polypeptide
FPWWWPF

SEQ ID NO: 748 - protein, 16 aa, Bos taurus
  MOD_RES (16)..(16): Any amino acid
ICLKKWPWWPWRRCKX

SEQ ID NO: 749 - protein, 14 aa, Bos taurus
  MOD_RES (14)..(14): Any amino acid
ILKKWPWWPWRRKX

SEQ ID NO: 750 - protein, 22 aa, Bos taurus
YPGPQAKEDSEGPSQGPASREK

SEQ ID NO: 751 - protein, 25 aa, Pagrus major
FFGWLIKGAIHAGKAIHGLIHRRRH

SEQ ID NO: 752 - protein, 25 aa, Pagrus major
FFGWLIRGAIHAGKAIHGLIHRRRH

SEQ ID NO: 753 - protein, 20 aa, Pagrus major
FIGLLISAGKAIHDLIRRRH

SEQ ID NO: 754 - protein, 65 aa, Rhipicephalus microplus
QRGSRGQRCGPGEVFNQCGSACPRVCGRPPAQACTLQCVSGCFCRRGYIRTQRGGCIPERQCHQR

SEQ ID NO: 755 - protein, 69 aa, Clostridium beijerinckii
VAGALGVQTAAATTIVNVILNAGTLVTVLGIIASIASGGAGTLMTIGWATFKATVQKLAKQSMARAIAY

SEQ ID NO: 756 - protein, 30 aa, Chassalia parviflora
GIPCGESCVWIPCISAALGCSCKNKVCYRN

SEQ ID NO: 757 - protein, 31 aa, Chassalia parviflora
GVIPCGESCVFIPCISTLLGCSCKNKVCYRN

SEQ ID NO: 758 - protein, 22 aa, Litoria citropa
GLIGSIGKALGGLLVDVLKPKL

SEQ ID NO: 759 - protein, 16 aa, Litoria citropa
GLFDVIKKVASVIGGL

SEQ ID NO: 760 - protein, 16 aa, Litoria citropa
GLFDIIKKVASVVGGL

SEQ ID NO: 761 - protein, 16 aa, Litoria citropa
GLFDIIKKVASVIGGL

SEQ ID NO: 762 - protein, 26 aa, Litoria citropa
GLIGSIGKALGGLLVDVLKPKLQAAS

SEQ ID NO: 763 - protein, 37 aa, Unknown; identical to SEQ ID NO: 198
  Description of Unknown: Platyrrhini (New World monkey) polypeptide

SEQ ID NO: 764 - protein, 23 aa, Styela clava
VFQFLGKIIHHVGNFVHGFSHVF

SEQ ID NO: 765 - protein, 23 aa, Styela clava
VFQFLGRIIHHVGNFVHGFSHVF

SEQ ID NO: 766 - protein, 23 aa, Styela clava
VFHLLGKIIHHVGNFVYGFSHVF

SEQ ID NO: 767 - protein, 23 aa, Styela clava
AFKLLGRIIHHVGNFVYGFSHVF

SEQ ID NO: 768 - protein, 23 aa, Styela clava
FLRFIGSVIHGIGHLVHHIGVAL

SEQ ID NO: 769 - protein, 40 aa, Gallus gallus
MTPFWRGVSLRPVGASCRDNSECITMLCRKNRCFLRTASE

SEQ ID NO: 770 - protein, 82 aa, Clostridium tyrobutyricum
PNWTKIGKCAGSIAWAIGSGLFGGAKLIKIKKYIAELGGLQKAAKLLVGATTWEEKLHAGGYALINLAAELTGVAGIQANCF

SEQ ID NO: 771 - protein, 74 aa, Zophobas atratus
SLQGGAPNFPQPSQQNGGWQVSPDLGRDDKGNTRGQIEIQNKGKDHDFNAGWGKVIRGPNKAKPTWHVGGTYRR

SEQ ID NO: 772 - protein, 581 aa, Escherichia coli
MSGGDGRGHNTGAHSTSGNINGGPTGLGVGGGASDGSGWSSENNPWGGGSGSGIHWGGGSGHGNGGGNGNSGGGSGTGGNLSAVAAPVAFGFPALSTPGAGGLAVSISAGALSAAIADIMAALKGPFKFGLWGVALYGVLPSQIAKDDPNMMSKIVTSLPADDITESPVSSLPLDKATVNVNVRVVDDVKDERQNISVVSGVPMSVPVVDAKPTERPGVFTASIPGAPVLNISVNNSTPEVQTLSPGVTNNTDKDVRPAGFTQGGNTRDAVIRFPKDSGHNAVYVSVSDVLSPDQVKQRQDEENRRQQEWDATHPVEAAERNYERARAELNQANEDVARNQERQAKAVQVYNSRKSELDAANKTLADAIAEIKQFNRFAHDPMAGGHRMWQMAGLKAQRAQTDVNNKQAAFDAAAKEKSDADAALSAAQERRKQKENKEKDAKDKLDKESKRNKPGKATGKGKPVGDKWLDDAGKDSGAPIPDRIADKLRDKEFKNFDDFRKKFWEEVSKDPDLSKQFKGSNKTNIQKGKAPFARKKDQVGGRERFELHHDKPISQDGGVYDMNNIRVTTPKRHIDIHRGK

SEQ ID NO: 773 - protein, 551 aa, Escherichia coli
MSGGDGRGHNTGAHSTSGNINGGPTGLGVGGGASDGSGWSSENNPWGGGSGSGIHWGGGSGHGNGGGNGNSGGGSGTGGNLSAVAAPVAFGFPALSTPGAGGLAVSISAGALSAAIADIMAALKGPFKFGLWGVALYGVLPSQIAKDDPNMMSKIVTSLPADDITESPVSSLPLDKATVNVNVRVVDDVKDERQNISVVSGVPMSVPVVDAKPTERPGVFTASIPGAPVLNISVNNSTPAVQTLSPGVTNNTDKDVRPAGFTQGGNTRDAVIRFPKDSGHNAVYVSVSDVLSPDQVKQRQDEENRRQQEWDATHPVEAAERNYERARAELNQANEDVARNQERQAKAVQVYNSRKSELDAANKTLADAIAEIKQFNRFAHDPMAGGHRMWQMAGLKAQRAQTDVNNKQAAFDAAAKEKSDADAALSSAMESRKKKEDKKRSAENNLNDEKNKPRKGFKDYGHDYHPAPKTENIKGLGDLKPGIPKTPKQNGGGKRKRWTGDKGRKIYEWDSQHGELEGYRASDGQHLGSFDPKTGNQLKGPDPKRNIKKYL

SEQ ID NO: 774 - protein, 88 aa, Escherichia coli
ASGRDIAMAIGTLSGQFVAGGIGAAAGGVAGGAIYDYASTHKPNPAMSPSGLGGTIKQKPEGIPSEAWNYAAGRLCNWSPNNLSDVCL

SEQ ID NO: 775 - protein, 23 aa, Conus mustelinus
FHPSLWVLIPQYIQLIRKILKSG

SEQ ID NO: 776 - protein, 32 aa, Oryctolagus cuniculus
MPCSCKKYCDPWEVIDGSCGLFNSKYICCREK

SEQ ID NO: 777 - protein, 46 aa, Vigna unguiculata
KTCMTKKEGWGRCLIDTTCAHSCRKYGYMGGKCQGITRRCYCLLNC

SEQ ID NO: 778 - protein, 13 aa, Vespa crabro
FLPLILRKIVTAL

SEQ ID NO: 779 - protein, 110 aa, Portunus trituberculatus
MKMQTVIAMAVVATIVAMTEASLVLPYPGLDCKYWCKDNYDKHYCRGPPGRTYPPYTERSGKCPPVRATCTGVRSRLPKLCPHDGACDFPSKCCYDACVEHHVCKTPDFY

SEQ ID NO: 780 - protein, 38 aa, Mus musculus
LQDAALGWGRRCPRCPPCPNCRRCPRCPTCPSCNCNPK

SEQ ID NO: 781 - protein, 38 aa, Mus musculus
LQDAALGWGRRCPRCPPCPNCRRCPRCPTCPRCNCNPK

SEQ ID NO: 782 - protein, 38 aa, Mus musculus
LQDAALGWSRRCPRCPPCPNCRRCPRCPTCPSCNCNPK

SEQ ID NO: 783 - protein, 24 aa, Cryptotympana dubia
GLLNGLALRLGKRALKKIIKRLCR

SEQ ID NO: 784 - protein, 25 aa, Artificial Sequence
  Description of Artificial Sequence: Synthetic Anti-viral polypeptide
IGKEFKRIVQRIKDFLRNLVPRTES

SEQ ID NO: 785 - protein, 35 aa, Cupiennius salei
GFGALFKFLAKKVAKTVAKQAAKQGAKYVVNKQME

SEQ ID NO: 786 - protein, 35 aa, Cupiennius salei
GFGSLFKFLAKKVAKTVAKQAAKQGAKYIANKQME

SEQ ID NO: 787 - protein, 35 aa, Cupiennius salei
GFGSLFKFLAKKVAKTVAKQAAKQGAKYIANKQTE

SEQ ID NO: 788 - protein, 35 aa, Cupiennius salei
GFGSLFKFLAKKVAKTVAKQAAKQGAKYVANKHME

SEQ ID NO: 789 - protein, 35 aa, Cupiennius salei
GFGSLFKFLAKKVAKTVAKQAAKQGAKYVANKHMQ

SEQ ID NO: 790 - protein, 12 aa, Lactobacillus curvatus
TPVVNPPFLQQT

SEQ ID NO: 791 - protein, 10 aa, Lactobacillus curvatus
  MOD_RES (10)..(10): Any amino acid
VAPFPEQFLX

SEQ ID NO: 792 - protein, 9 aa, Lactobacillus curvatus
NIPQLTPTP

SEQ ID NO: 793 - protein, 30 aa, Lactobacillus curvatus
AYPGNGVHCGKYSCTVDKQTAIGNIGNNAA

SEQ ID NO: 794 - protein, 12 aa, Bos taurus
RLCRIVVIRVCR

SEQ ID NO: 795 - protein, 6 aa, Annona cherimola
PGLGFY

SEQ ID NO: 796 - protein, 9 aa, Annona cherimola
PGMGIYLPM

SEQ ID NO: 797 - protein, 31 aa, Psychotria longipes
SIPCGESCVFIPCTVTALLGCSCKSKVCYKN

SEQ ID NO: 798 - protein, 30 aa, Viola biflora
GIPCAESCVWIPCTVTALIGCGCSNKVCYN

SEQ ID NO: 799 - protein, 31 aa, Viola biflora
GTFPCGESCVFIPCLTSAIGCSCKSKVCYKN

SEQ ID NO: 800 - protein, 31 aa, Viola biflora
GLLPCAESCVYIPCLTTVIGCSCKSKVCYKN

SEQ ID NO: 801 - protein, 30 aa, Viola odorata
GIPCGESCVWIPCISSAIGCSCKSKVCYRN

SEQ ID NO: 802 - protein, 112 aa, Homo sapiens
RKKTFLSVHEVMAVENYAKDSLQWITDQYNKESDDKYHFRIFRVLKVQRQVTDHLEYHLNVEMQWTTCQKPETTNCVPQERELHKQVNCFFSVFAVPWFEQYKILNKSCSSD

SEQ ID NO: 803 - protein, 27 aa, Brassica rapa
  subsp. rapa
  MOD_RES (11)..(11): Any amino acid
QKLCERPSGTXSGVCGNNNACKNQCIR

SEQ ID NO: 804 - protein, 69 aa, Lachesana tarabaevi
GFFGNTWKKIKGKADKIMLKKAVKIMVKKEGIFKEEAQAKVDAMSKKQIRLYLLKYYGKKALQKASEKL

SEQ ID NO: 805 - protein, 69 aa, Lachesana tarabaevi
GFFGNTWKKIKGKTDKIMLKKAVKIMVKKEGISKEEAQAKVDAMSKKQIRLYLLKHYGKKALQKASEKL

SEQ ID NO: 806 - protein, 69 aa, Lachesana tarabaevi
GFFGNTWKKIKGKADKIMLKKAVKIMVKKEGISKEEAQAKVDAMSKKQIRLYLLKYYGKKALQKASEKL

SEQ ID NO: 807 - protein, 69 aa, Lachesana tarabaevi
GFFGNTWKKIKGKADKIMLKKAVKIMVKKEGISKEEAQAKVDAMSKKQIRLYLLKHYGKKALQKASEKL

SEQ ID NO: 808 - protein, 69 aa, Lachesana tarabaevi
GFFGNTWKKIKGKADKIMLKKAVKIMVKKEGISKEEAQAKVDAMSKKQIRLYVLKHYGKKALQKASEKL

SEQ ID NO: 809 - protein, 69 aa, Lachesana tarabaevi
GFFGNAWKKIKGKAEKFFRKKAAKIIAKKEGITKEEAEAKVDTMSKKQIKVYLLKHYGKKALQKASEKL

SEQ ID NO: 810 - protein, 13 aa, Opisthacanthus madagascariensis
ILGKIWEGIKSLF

SEQ ID NO: 811 - protein, 13 aa, Artificial Sequence
  Description of Artificial Sequence: Synthetic Anti-viral polypeptide
ILGKIAEGIKSLF

SEQ ID NO: 812 - protein, 13 aa, Artificial Sequence
  Description of Artificial Sequence: Synthetic Anti-viral polypeptide
ILGKILEGIKSLF

SEQ ID NO: 813 - protein, 13 aa, Artificial Sequence
  Description of Artificial Sequence: Synthetic Anti-viral polypeptide
ILGKIWKGIKSLF

SEQ ID NO: 814 - protein, 13 aa, Artificial Sequence
  Description of Artificial Sequence: Synthetic Anti-viral polypeptide
ILGKILKGIKKLF

SEQ ID NO: 815 - protein, 12 aa, Artificial Sequence
  Description of Artificial Sequence: Synthetic Anti-viral polypeptide
ILGKIWKIKKLF

SEQ ID NO: 816 - protein, 11 aa, Opisthacanthus madagascariensis
IFGAIWNGIKS

SEQ ID NO: 817 - protein, 13 aa, Litoria dahlii
GLFDIIKNIVSTL

SEQ ID NO: 818 - protein, 13 aa, Litoria dahlii
GLFDIIKNIFSGL

SEQ ID NO: 819 - protein, 11 aa, Oreumenes decoratus
SLLSLIRKLIT

SEQ ID NO: 820 - protein, 40 aa, Anopheles gambiae
ATCDLASGFGVGSSLCAAHCIARRYRGGYCNSKAVCVCRN

SEQ ID NO: 821 - protein, 29 aa, Anopheles gambiae
VNHALCAAHCIARRYRGGYCNSKAVCVCR

SEQ ID NO: 822 - protein, 34 aa, Anopheles gambiae
SQWVTPNDSLCAAHCIARRYRGGYCNGKRVCVCR

SEQ ID NO: 823 - protein, 33 aa, Anopheles gambiae
SQWVTPNDSLCAAHCLVKGYRGGYCKNKICHCR

SEQ ID NO: 824 - protein, 29 aa, Anopheles gambiae
WNHTLCAAHCIARRYRGGYCNSKAVCVCR

SEQ ID NO: 825 - protein, 38 aa, Aeshna cyanea
GFGCPLDQMQCHRHCQTITGRSGGYCSGPLKLTCTCYR

SEQ ID NO: 826 - protein, 43 aa, Pyrrhocoris apterus
ATCDILSFQSQWVTPNHAGCALHCVIKGYKGGQCKITVCHCRR

SEQ ID NO: 827 - protein, 38 aa, Rhipicephalus microplus
GFGCPFNQGACHRHCRSIRRRGGYCAGLIKQTCTCYRN

SEQ ID NO: 828 - protein, 36 aa, Dermacentor variabilis
GFGCPLNQGACHNHCRSIRRRGGYCSGIIKQTCTCY

SEQ ID NO: 829 - protein, 43 aa, Trypoxylus dichotomus
VTCDLLSFEAKGFAANHSLCAAHCLAIGRRGGSCERGVCICRR

SEQ ID NO: 830 - protein, 40 aa, Drosophila melanogaster
ATCDLLSKWNWNHTACAGHCIAKGFKGGYCNDKAVCVCRN

SEQ ID NO: 831 - protein, 43 aa, Palomena prasina
ATCDALSFSSKWLTVNHSACAIHCLTKGYKGGRCVNTICNCRN

SEQ ID NO: 832 - protein, 98 aa, Mamestra brassicae
MLCLADIRIVASCSAAIKSGYGQQPWLAHVAGPYANSLFDDVPADSYHAAVEYLRLIPASCYLLDGYAAGRDDGRAHCIAPRNRRLYCASYQVCVCRY

SEQ ID NO: 833 - protein, 40 aa, Formica aquilonia
FTCDLLSGAGVDHSACAAHCILRGKTGGRCNSDRVCVCRA

SEQ ID NO: 834 - protein, 51 aa, Bombus pascuorum
VTCDLLSIKGVAEHSACAANCLSMGKAGGRCENGICLCRKTTFKELWDKRF

SEQ ID NO: 835 - protein, 40 aa, Phlebotomus duboscqi
ATCDLLSAFGVGHAACAAHCIGHGYRGGYCNSKAVCTCRR

SEQ ID NO: 836 - protein, 10 aa, Stomoxys calcitrans
ATCDLLSMWN

SEQ ID NO: 837 - protein, 33 aa, Triatoma brasiliensis
SQWVTPNHAACAAHCLLRGNRGGECKGTICHCR

SEQ ID NO: 838 - protein, 33 aa, Triatoma brasiliensis
SKWVTPNHAACAAHCLLRGNRGGQCKGTICHCR

SEQ ID NO: 839 - protein, 37 aa, Ornithodoros moubata
GYGCPFNQYQCHSHCRGIRGYKGGYCTGRFKQTCKCY

SEQ ID NO: 840 - protein, 43 aa, Zophobas atratus
FTCDVLGFEIAGTKLNSAACGAHCLALGRTGGYCNSKSVCVCR

SEQ ID NO: 841 - protein, 37 aa, Ornithodoros moubata
GYGCPFNQYQCHSHCSGIRGYKGGYCKGLFKQTCNCY

SEQ ID NO: 842 - protein, 37 aa, Ornithodoros moubata
GFGCPFNQYECHAHCSGVPGYKGGYCKGLFKQTCNCY

SEQ ID NO: 843 - protein, 24 aa, Spinacia oleracea
  MOD_RES (8)..(8): Any amino acid
  MOD_RES (19)..(19): Any amino acid
  MOD_RES (22)..(23): Any amino acid
GIFSNMYXRTPAGYFRGPXGYXXN

SEQ ID NO: 844 - protein, 38 aa, Spinacia oleracea
GIFSSRKCKTPSKTFKGYCTRDSNCDTSCRYEGYPAGD

SEQ ID NO: 845 - protein, 38 aa, Mytilus galloprovincialis
GFGCPNNYQCHRHCKSIPGRCGGYCGGWHRLRCTCYRC

SEQ ID NO: 846 - protein, 32 aa, Rattus norvegicus
VTCYCRRTRCGFRERLSGACGYRGRIYRLCCR

SEQ ID NO: 847 - protein, 9 aa, Oryctes rhinoceros
AHCLAIGRK

SEQ ID NO: 848 - protein, 43 aa, Zophobas atratus
FTCDVLGFEIAGTKLNSAACGAHCLALGRRGGYCNSKSVCVCR

SEQ ID NO: 849 - protein, 46 aa, Stomoxys calcitrans
AAKPMGITCDLLSLWKVGHAACAAHCLVLGDVGGYCTKEGLCVCKE

SEQ ID NO: 850 - protein, 32 aa, Papio hamadryas
RICRCRIGRCLGLEVYFGVCFLHGRLARRCCR

SEQ ID NO: 851 - protein, 35 aa, Mus musculus
LRDLVCYCRSRGCKGRERMNGTCRKGHLLYTLCCR

SEQ ID NO: 852 - protein, 32 aa, Papio hamadryas
RTCRCRLGRCSRRESYSGSCNINGRIYSLCCR

SEQ ID NO: 853 - protein, 35 aa, Pan troglodytes
STRAFTCHCRRSCYSTEYSYGTCTVMGINHRFCCL

SEQ ID NO: 854 - protein, 40 aa, Aedes aegypti
ATCDLLSGFGVGDSACAAHCIARGNRGGYCNSKKVCVCRN

SEQ ID NO: 855 - protein, 37 aa, Mytilus edulis
  MOD_RES (21)..(21): Any amino acid
  MOD_RES (28)..(28): Any amino acid
GFGCPNDYPCHRHCKSIPGRXGGYCGGXHRLRCTCYR

SEQ ID NO: 856 - protein, 43 aa, Anomala cuprea
VTCDLLSFEAKGFAANHSICAAHCLAIGRKGGSCQNGVCVCRN

SEQ ID NO: 857 - protein, 43 aa, Glossina morsitans
  Glossina morsitans morsitans
VTGELKRDKRVTCNIGEWVCVAHCNSKSKKSGYCSRGVCYCTN

SEQ ID NO: 858 - protein, 35 aa, Mytilus edulis
  MOD_RES (28)..(28): Any amino acid
GFGCPNDYPCHRHCKSIPGRYGGYCGGXHRLRCTC

SEQ ID NO: 859 - protein, 43 aa, Anomala cuprea
VTCDLLSFEAKGFAANHSICAAHCLVIGRKGGACQNGVCVCRN

SEQ ID NO: 860 - protein, 40 aa, Aedes aegypti
ATCDLLSGFGVGDSACAAHCIARGNRGGYCNSQKVCVCRN

SEQ ID NO: 861 - protein, 40 aa, Aedes aegypti
ATCDLLSGFGVGDSACAAHCIARRNRGGYCNAKKVCVCRN

SEQ ID NO: 862 - protein, 44 aa, Galleria mellonella
DKLIGSCVWGATNYTSDCNAECKRRGYKGGHCGSFWNVNCWCEE

SEQ ID NO: 863 - protein, 35 aa, Mus musculus
LRDLVCYCRSRGCKGRERMNGTCRKGHLMYTLCCR

SEQ ID NO: 864 - protein, 35 aa, Mus musculus
LRDLVCYCRTRGCKRRERMNGTCRKGHLMYTLCCR

SEQ ID NO: 865 - protein, 35 aa, Mus musculus
LRDLVCYCRKRGCKRRERMNGTCRKGHLMYTLCCR

SEQ ID NO: 866 - protein, 32 aa, Mus musculus
GLLCYCRKGHCKRGERVRGTCGIRFLYCCPRR

SEQ ID NO: 867 - protein, 33 aa, Mus musculus
DLVCYCRARGCKGRERMNGTCRKGHLLYMLCCR

SEQ ID NO: 868 - protein, 9 aa, Macaca mulatta
RCICVLGIC

SEQ ID NO: 869 - protein, 33 aa, Phyllomedusa distincta
GLWSKIKAAGKEAAKAAAKAAGKAALNAVSEAV

SEQ ID NO: 870 - protein, 28 aa, Phyllomedusa distincta
ALWKTLLKNVGKAAGKAALNAVTDMVNQ

SEQ ID NO: 871 - protein, 31 aa, Phyllomedusa distincta
ALWKTMLKKLGTMALHAGKAAFGAAADTISQ

SEQ ID NO: 872 - protein, 30 aa, Phyllomedusa distincta
ALWKNMLKGIGKLAGQAALGAVKTLVGAES

SEQ ID NO: 873 - protein, 25 aa, Phyllomedusa distincta
GLWSKIKEAAKTAGLMAMGFVNDMV

SEQ ID NO: 874 - protein, 21 aa, Phyllomedusa azurea
GLWSTIKNVAAAAGKAALGAL

SEQ ID NO: 875 - protein, 26 aa, Agalychnis annae
GLVSGLLNTAGGLLGDLLGSLGSLSG

SEQ ID NO: 876 - protein, 27 aa, Agalychnis annae
SLWSKIKEMAATAGKAALNAVTGMVNQ

SEQ ID NO: 877 - protein, 26 aa, Agalychnis annae
GMFTNMLKGIGKLAGQAALGAVKTLA

SEQ ID NO: 878 - protein, 27 aa, Agalychnis annae
GMWGSLLKGVATVVKHVLPHALSSQQS

SEQ ID NO: 879 - protein, 32 aa, Agalychnis annae
GMWSTIRNVGKSAAKAANLPAKAALGAISEAV

SEQ ID NO: 880 - protein, 27 aa, Phyllomedusa bicolor
DVLKKIGTVALHAGKAALGAVADTISQ

SEQ ID NO: 881 - protein, 31 aa, Phyllomedusa bicolor
AMWKDVLKKIGTVALHAGKAALGAVADTISQ

SEQ ID NO: 882 - protein, 30 aa, Pachymedusa dacnicolor
SLGSFMKGVGKGLATVGKIVADQFGKLLEA

SEQ ID NO: 883 - protein, 31 aa, Pachymedusa dacnicolor
ALWKTLLKKVGKVAGKAVLNAVTNMANQNEQ

SEQ ID NO: 884 - protein, 33 aa, Pachymedusa dacnicolor
GMWSKIKNAGKAAAKASKKAAGKAALGAVSEAL

SEQ ID NO: 885 - protein, 23 aa, Pachymedusa dacnicolor
GVVTDLLNTAGGLLGNLVGSLSG

SEQ ID NO: 886 - protein, 24 aa, Pachymedusa dacnicolor
LLGDLLGQTSKLVNDLTDTVGSIV

SEQ ID NO: 887 - protein, 29 aa, Phyllomedusa oreades
GLWSTIKQKGKEAAIAAAKAAGQAALGAL

SEQ ID NO: 888 - protein, 34 aa, Phyllomedusa sauvagii
ALWKTMLKKLGTMALHAGKAALGAAADTISQGTQ

SEQ ID NO: 889 - protein, 25 aa, Phyllomedusa hypochondrialis
GLWSTIKNVGKEAAIAAGKAALGAL

SEQ ID NO: 890 - protein, 34 aa, Phyllomedusa sauvagii
ALWFTMLKKLGTMALHAGKAALGAAANTISQGTQ

SEQ ID NO: 891 - protein, 30 aa, Phyllomedusa bicolor
ALWKTIIKGAGKMIGSLAKNLLGSQAQPES

SEQ ID NO: 892 - protein, 29 aa, Phyllomedusa hypochondrialis
GLWSTIKQKGKEAAIAAAKAAGQAALGAL

SEQ ID NO: 893 - protein, 30 aa, Agalychnis annae; identical to SEQ ID NO: 882

SEQ ID NO: 894 - protein, 28 aa, Phyllomedusa bicolor
ALWKNMLKGIGKLAGQAALGAVKTLVGA

SEQ ID NO: 895 - protein, 28 aa, Phyllomedusa bicolor
ALWKDILKNVGKAAGKAVLNTVTDMVNQ

SEQ ID NO: 896 - protein, 26 aa, Phyllomedusa bicolor
GLWNKIKEAASKAAGKAALGFVNEMV

SEQ ID NO: 897 - protein, 24 aa, Phyllomedusa bicolor
ALWKDILKNAGKAALNEINQLVNQ

SEQ ID NO: 898 - protein, 29 aa, Phyllomedusa azurea
GLWSTIKQKGKEAAIAAAKAAGQAALGAL

SEQ ID NO: 899 - protein, 25 aa, Phyllomedusa azurea
GLWSTIKNVGKEAAIAAGKAALGAL

SEQ ID NO: 900 - protein, 25 aa, Phyllomedusa azurea
GLWSTIKNVGKEAAIAAGKAVLGSL

SEQ ID NO: 901 - protein, 26 aa, Phyllomedusa bicolor
GLVTSLIKGAGKLLGGLFGSVTGGQS

SEQ ID NO: 902 - protein, 32 aa, Phyllomedusa bicolor
SLGSFLKGVGTTLASVGKVVSDQFGKLLQAGQ

SEQ ID NO: 903 - protein, 47 aa, Homo sapiens
SSLLEKGLDGAKKAVGGLGKLGKDAVEDLESVGKGAVHDVKDVLDSV

SEQ ID NO: 904 - protein, 21 aa, Mus musculus
CPPCPSCPSCPWCPMCPRCPS

SEQ ID NO: 905 - protein, 30 aa, Halocynthia aurantium
ILQKAVLDCLKAAGSSLSKAAITAIYNKIT

SEQ ID NO: 906 - protein, 37 aa, Sarcophaga peregrina
DLHIPPPDNKINWPQLSGGGGGSPKTGYDININAQQK

SEQ ID NO: 907 - protein, 83 aa, Drosophila melanogaster
DDMTMKPTPPPQYPLNLQGGGGGQSGDGFGFAVQGHQKVWTSDNGRHEIGLNGGYGQHLGGPYGNSEPSWKVGSTYTYRFPNF

SEQ ID NO: 908 - protein, 82 aa, Protophormia terraenovae
DEKPKLILPTPAPPNLPQLVGGGGGNRKDGFGVSVDAHQKVWTSDNGGHSIGVSPGYSQHLPGPYGNSRPDYRIGAGYSYNF

SEQ ID NO: 909 - protein, 82 aa, Protophormia terraenovae
DEKPKLILPTPAPPNLPQLVGGGGGNRKDGFGVSVDAHQKVWTSDNGRHSIGVTPGYSQHLGGPYGNSRPDYRIGAGYSYNF

SEQ ID NO: 910 - protein, 25 aa, Artificial Sequence
  Description of Artificial Sequence: Synthetic Anti-viral polypeptide
NLVSGLIEARKYLEQLHRKLKNCKV

SEQ ID NO: 911 - protein, 43 aa, Carnobacterium divergens
TKYYGNGVYCNSKKCWVDWGQASGCIGQTVVGGWLGGAIPGKC

SEQ ID NO: 912 - protein, 28 aa, Phyllomedusa azurea
GLWSKIKDVAAAAGKAALGAVNEALGEQ

SEQ ID NO: 913 - protein, 33 aa, Dolabella auricularia
SHQDCYEALHKCMASHSKPFSCSMKFHMCLQQQ

SEQ ID NO: 914 - protein, 17 aa, Polistes dominula
INWKKIAEVGGKILSSL

SEQ ID NO: 915 - protein, 17 aa, Polistes dominula
INWKKIAEIGKQVLSAL

SEQ ID NO: 916 - protein, 19 aa, Drosophila melanogaster
GKPRPYSPRPTSHPRPIRV

SEQ ID NO: 917 - protein, 19 aa, Drosophila simulans
GKPRPYSPRPTSHPRPIRV

SEQ ID NO: 918 - protein, 33 aa, Rana dybowskii
GLFDVVKGVLKGVGKNVAGSLLEQLKCKLSGGC

SEQ ID NO: 919 - protein, 15 aa, Rana dybowskii
VWPLGLVICKALKIC

SEQ ID NO: 920 - protein, 20 aa, Rana dybowskii
FLPLLLAGLPLKLCFLFKKC

SEQ ID NO: 921 - protein, 7 aa, Artificial Sequence
  Description of Artificial Sequence: Synthetic Anti-viral polypeptide
LKLLKKL

SEQ ID NO: 922 - protein, 10 aa, Artificial Sequence
  Description of Artificial Sequence: Synthetic Anti-viral polypeptide
LKKLLKKLKK

SEQ ID NO: 923 - protein, 12 aa, Artificial Sequence
  Description of Artificial Sequence: Synthetic Anti-viral polypeptide
LKKLLKKLKKLL

SEQ ID NO: 924 - protein, 14 aa, Artificial Sequence
  Description of Artificial Sequence: Synthetic Anti-viral polypeptide
LKKLLKKLKKLLKK

SEQ ID NO: 925 - protein, 14 aa, Artificial Sequence
  Description of Artificial Sequence: Synthetic Anti-viral polypeptide
LKLLKKLLKLLKKL

SEQ ID NO: 926 - protein, 17 aa, Artificial Sequence
  Description of Artificial Sequence: Synthetic Anti-viral polypeptide
SNMIEGVFAKGFKKASH

SEQ ID NO: 927 - protein, 23 aa, Artificial Sequence
  Description of Artificial Sequence: Synthetic Anti-viral polypeptide
SNMIEGVFAKGFKKASHLFKGIG

SEQ ID NO: 928 - protein, 57 aa, Homo sapiens
AQEPVKGPVSTKPGSCPIILIRCAMLNPPNRCLKDTDCPGIKKCCEGSCGMACFVPQ

SEQ ID NO: 929 - protein, 15 aa, Lysobacter sp.
  strain XL 1
AVVNGVNYVGETTAA

SEQ ID NO: 930 - protein, 32 aa, Sus scrofa
RADTQTYQPYNKDWIKEKIYVLLRRQAQQAGK

SEQ ID NO: 931 - protein, 29 aa, Bos taurus
FAEPLPSEEEGESYSKEVPEMEKRYGGFM

SEQ ID NO: 932 - protein, 38 aa, Bos taurus
NPLSCRLNRGICVPIRCPGNLRQIGTCFTPSVKCCRWR

SEQ ID NO: 933 - protein, 35 aa, Unknown
  Description of Unknown: Anti-viral polypeptide
YYGNGVYCTKNKCTVDWAKATTCIAGMSIGGFLGG

SEQ ID NO: 934 - protein, 53 aa, Enterococcus faecium
  Enterococcus faecium T136
ENDHRMPNNLNRPNNLSKGGAKCGAAIAGGLFGIPKGPLAWAAGLANVYSKCN

SEQ ID NO: 935 - protein, 62 aa, Enterococcus sp.
NRWYCNSAAGGVGGAAVCGLAGYVGEAKENIAGEVRKGWGMAGGFTHNKACKSFPGSGWASG

SEQ ID NO: 936 - protein, 44 aa, Enterococcus faecalis
MLAKIKAMIKKFPNPYTLAAKLTTYEINWYKQQYGRYPWERPVA

SEQ ID NO: 937 - protein, 44 aa, Enterococcus faecium
MGAIAKLVAKFGWPIVKKYYKQIMQFIGEGWAINKIIEWIKKHI

SEQ ID NO: 938 - protein, 43 aa, Enterococcus faecium
MGAIAKLVTKFGWPLIKKFYKQIMQFIGQGWTIDQIEKWLKRH

SEQ ID NO: 939 - protein, 44 aa, Enterococcus faecium
ATRSYGNGVYCNNSKCWVNWGEAKENIAGIVISGWASGLAGMGH

SEQ ID NO: 940 - protein, 34 aa, Enterococcus faecium
MNFLKNGIAKWMTGAELQAYKKKYGCLPWEKISC

SEQ ID NO: 941 - protein, 44 aa, Enterococcus faecalis
  Enterococcus faecalis RJ 11
APAGLVAKFGRPIVKKYYKQIMQFIGEGSAINKIIPWIARMWRT

SEQ ID NO: 942 - protein, 43 aa, Enterococcus faecalis
  Enterococcus faecalis RJ 11
ATYYGNGVYCNKQKCWVDWSRARSEIIDRGVKAYVNGFTKVLG

SEQ ID NO: 943 - protein, 133 aa, Homo sapiens
RPPQFTRAQWFAIQHISLNPPRCTIAMRAINNYRWRCKNQNTFLRTTFANVVNVCGNQSIRCPHNRTLNNCHRSRFRVPLLHCDLINPGAQNISNCTYADRPGRRFYVVACDNRDPRDSPRYPVVPVHLDTTI

SEQ ID NO: 944 - protein, 30 aa, Staphylococcus epidermidis
SLGPAIKATRQVCPKATRFVTVSCKKSDCQ

SEQ ID NO: 945 - protein, 25 aa, Epinephelus coioides
FIFHIIKGLFHAGKMIHGLVTRRRH

SEQ ID NO: 946 - protein, 32 aa, Bacillus subtilis
  Bacillus subtilis A13
WKSESVCTPGCVTGVLQTCFLQTITCNCHISK

SEQ ID NO: 947 - protein, 46 aa, Pelophylax esculentus
GIFSKLGRKKIKNLLISGLKNVGKEVGMDVVRTGIDIAGCKIKGEC

SEQ ID NO: 948 - protein, 46 aa, Pelophylax esculentus
GIFSKLAGKKIKNLLISGLKNVGKEVGMDVVRTGIDIAGCKIKGEC

SEQ ID NO: 949 - protein, 46 aa, Pelophylax ridibundus
GIFSKLAGKKLKNLLISGLKNVGKEVGMDVVRTGIDIAGCKIKGEC

SEQ ID NO: 950 - protein, 46 aa, Pelophylax esculentus; identical to SEQ ID NO: 949

SEQ ID NO: 951 - protein, 46 aa, Odorrana hosii
GIFSKFGGKAIKNLFIKGAKNIGKEVGMDVIRTGIDVAGCKIKGEC

SEQ ID NO: 952 - protein, 46 aa, Pelophylax ridibundus
GIFSKLAGKKLKNLLISGLKSVGKEVGMDVVRTGIDIAGCKIKGEC

SEQ ID NO: 953 - protein, 46 aa, Rana sevosa
GLFSKFNKKKIKSGLIKIIKTAGKEAGLEALRTGIDVIGCKIKGEC

SEQ ID NO: 954 - protein, 46 aa, Rana sevosa
GLFSKFNKKKIKSGLFKIIKTAGKEAGLEALRTGIDVIGCKIKGEC

SEQ ID NO: 955 - protein, 37 aa, Pelophylax esculentus
GILSLVKGVAKLAGKGLAKEGGKFGLELIACKIAKQC

SEQ ID NO: 956 - protein, 37 aa, Pelophylax esculentus
GIFSLVKGAAKLAGKGLAKEGGKFGLELIACKIAKQC

SEQ ID NO: 957 - protein, 37 aa, Rana berlandieri
GLFSILRGAAKFASKGLGKDLTKLGVDLVACKISKQC

SEQ ID NO: 958 - protein, 37 aa, Odorrana hosii
GIFSLIKGAAQLIGKTVAKEAGKTGLELMACKVTKQC

SEQ ID NO: 959 - protein, 37 aa, Rana luteiventris
GILSLFTGGIKALGKTLFKMAGKAGAEHLACKATNQC

SEQ ID NO: 960 - protein, 37 aa, Rana pipiens
GFSSIFRGVAKFASKGLGKDLARLGVNLVACKISKQC

SEQ ID NO: 961 - protein, 37 aa, Odorrana schmackeri
GLFTLIKGAVKMIGKTVAKEAGKTGLELMACKVTNQC

SEQ ID NO: 962 - protein, 37 aa, Rana sevosa
GFFSLIKGVAKIATKGLAKNLGKMGLDLVGCKISKEC

SEQ ID NO: 963 - protein, 46 aa, Odorrana grahami
GLFSKFAGKGIKNLIFKGVKHIGKEVGMDVIRTGIDVAGCKIKGEC

SEQ ID NO: 964 - protein, 14 aa, Anterhynchium flavomarginatum
  Anterhynchium flavomarginatum micado
INLLKIAKGIIKSL

SEQ ID NO: 965 - protein, 47 aa, Vicia faba
LLGRCKVKSNRFHGPCLTDTHCSTVCRGEGYKGGDCHGLRRRCMCLC

SEQ ID NO: 966 - protein, 47 aa, Vicia faba
LLGRCKVKSNRFNGPCLTDTHCSTVCRGEGYKGGDCHGLRRRCMCLC

SEQ ID NO: 967 - protein, 39 aa, Homo sapiens
FALLGDFFRKSKEKIGKEFKRIVQRIKDFLRNLVPRTES

SEQ ID NO: 968 - protein, 16 aa, Litoria fallax
GLLDLAKHVIGIASKL

SEQ ID NO: 969 - protein, 17 aa, Litoria fallax
GLLDFAKHVIGIASKLG

SEQ ID NO: 970 - protein, 21 aa, Litoria fallax
GLLSFLPKVIGVIGHLIHPPS

SEQ ID NO: 971 - protein, 16 aa, Myrmecia gulosa
GRPNPVNNKPTPHPRL

SEQ ID NO: 972 - protein, 16 aa, Myrmecia gulosa
GRPNPVNTKPTPYPRL

SEQ ID NO: 973 - protein, 29 aa, Gallus gallus
RVKRFWPLVPVAINTVAAGINLYKAIRRK

SEQ ID NO: 974 - protein, 32 aa, Homo sapiens
LVQRGRFGRFLRKIRRFRPKVTITIQGSARFG

SEQ ID NO: 975 - protein, 32 aa, Gallus gallus; identical to SEQ ID NO: 974

SEQ ID NO: 976 - protein, 33 aa, Glandirana rugosa
SLFSLIKAGAKFLGKNLLKQGACYAACKASKQC

SEQ ID NO: 977 - protein, 33 aa, Glandirana rugosa
GIMSIVKDVAKNAAKEAAKGALSTLSCKLAKTC

SEQ ID NO: 978 - protein, 33 aa, Glandirana rugosa
GIMSIVKDVAKTAAKEAAKGALSTLSCKLAKTC

SEQ ID NO: 979 - protein, 37 aa, Glandirana rugosa
GILDTLKQFAKGVGKDLVKGAAQGVLSTVSCKLAKTC

SEQ ID NO: 980 - protein, 24 aa, Glandirana rugosa
FLGALFKVASKVLPSVFCAITKKC

SEQ ID NO: 981 - protein, 24 aa, Glandirana rugosa
FLPLLAGLAANFLPTIICKISYKC

SEQ ID NO: 982 - protein, 249 aa, Homo sapiens
ADNFSLHDALSGSGNPNPQGWPGAWGNQPAGAGGYPGASYPGAYPGQAPPGAYPGQAPPGAYPGAPGAYPGAPAPGVYPGPPSGPGAYPSSGQPSATGAYPATGPYGAPAGPLIVPYNLPLPGGVVPRMLITILGTVKPNANRIALDFQRGNDVAFHFNPRFNENNRRVIVCNTKLDNNWGREERQSVFPFESGKPFKIQVLVEPDHFKVAVNDAHLLQYNHRVKKLNEISKLGISGDIDLTSASYTMI

SEQ ID NO: 983 - protein, 72 aa, Kassina senegalensis
MLTLKKSMLLLFFLGLVSVSLADDKREDEAEEGEDKRAAEEERNVEKRCYSAAKYPGFQEFINRKYKSSRFG

SEQ ID NO: 984 - protein, 36 aa, Gallus gallus
LFCKGGSCHFGGCPSHLIKVGSCFGFRSCCKWPWNA

SEQ ID NO: 985 - protein, 39 aa, Gallus gallus
GRKSDCFRKSGFCAFLKCPSLTLISGKCSRFYLCCKRIW

SEQ ID NO: 986 - protein, 39 aa, Gallus gallus
GRKSDCFRKNGFCAFLKCPYLTLISGKCSRFHLCCKRIW

SEQ ID NO: 987 - protein, 43 aa, Gallus gallus
FPDTVACRTQGNFCRAGACPPTFTISGQCHGGLLNCCAKIPAQ

SEQ ID NO: 988 - protein, 79 aa, Gallus gallus
DTSRCVGYHGYCIRSKVCPKPFAAFGTCSWRQKTCCVDTTSDFHTCQDKGGHCVSPKIRCLEEQLGLCPLKRWTCCKEI

SEQ ID NO: 989 - protein, 46 aa, Gallus gallus
HGPDSCNHDRGLCRVGNCNPGEYLAKYCFEPVILCCKPLSPTPTKT

SEQ ID NO: 990 - protein, 66 aa, Gallus gallus
FSDSQLCRNNHGHCRRLCFHMESWAGSCMNGRLRCCRFSTKQPFSNPKHSVLHTAEQDPSPSLGGT

SEQ ID NO: 991 - protein, 41 aa, Gallus gallus
ESDTVTCRKMKGKCSFLLCPFFKRSSGTCYNGLAKCCRPFW

SEQ ID NO: 992 - protein, 38 aa, Gallus gallus
RYHMQCGYRGTFCTPGKCPHGNAYLGLCRPKYSCCRWL

SEQ ID NO: 993 - protein, 41 aa, Gallus gallus
GLPQDCERRGGFCSHKSCPPGIGRIGLCSKEDFCCRSRWYS

SEQ ID NO: 994 - protein, 42 aa, Gallus gallus
SPIHACRYQRGVCIPGPCRWPYYRVGSCGSGLKSCCVRNRWA

SEQ ID NO: 995 - protein, 42 aa, Gallus gallus
RPIDTCRLRNGICFPGICRRPYYWIGTCNNGIGSCCARGWRS

SEQ ID NO: 996 - protein, 61 aa, Anopheles gambiae
MVFAYAPTCARCKSIGARYCGYGYLNRKGVSCDGQTTINSCEDCKRKFGRCSDGFITECFF

SEQ ID NO: 997 - protein, 58 aa, Lactobacillus gasseri
IYWIADQFGIHLATGTARKLLDAMASGASLGTAFAAILGVTLPAWALAAAGALGATAA

SEQ ID NO: 998 - protein, 36 aa, Sus scrofa
ISDYSIAMDKIRQQDFVNWLLAQKGKKSDWKHNITQ

SEQ ID NO: 999 - protein, 130 aa, Hyalophora cecropia
DVTWDKNIGNGKVFGTLGQNDDGLFGKAGFKQQFFNDDRGKFEGQAYGTRVLGPAGGTTNFGGRLDWSDKNANAALDISKQIGGRPNLSASGAGVWDFDKNTRLSAGGSLSTMGRGKPDVGVHAQFQHDF

SEQ ID NO: 1000 - protein, 18 aa, Acanthoscurria gomesiana
ZCRRLCYKQRCVTYCRGR

SEQ ID NO: 1001 - protein, 10 aa, Artificial Sequence
  Description of Artificial Sequence: Synthetic Anti-viral polypeptide
  MOD_RES (2)..(2): Any amino acid
  MOD_RES (9)..(9): Any amino acid
VXLPFPFLXV

SEQ ID NO: 1002 - protein, 10 aa, Artificial Sequence
  Description of Artificial Sequence: Synthetic Anti-viral polypeptide
  MOD_RES (2)..(2): Any amino acid
  MOD_RES (9)..(9): Any amino acid
VXLPFFPLXV

SEQ ID NO: 1003 - protein, 10 aa, Artificial Sequence
  Description of Artificial Sequence: Synthetic Anti-viral polypeptide
  MOD_RES (2)..(2): Any amino acid
  MOD_RES (9)..(9): Any amino acid
VXLFPPFLXV

SEQ ID NO: 1004 - protein, 12 aa, Grammistes sexlineatus
IGGIISFFKRLF

SEQ ID NO: 1005 - protein, 13 aa, Grammistes sexlineatus
FIGGIISFFKRLF

SEQ ID NO: 1006 - protein, 28 aa, Grammistes sexlineatus
WWRELLKKLAFTAAGHLGSVLAAKQSGW

SEQ ID NO: 1007 - protein, 25 aa, Grammistes sexlineatus
LFGFLIKLIPSLFGALSNIGRNRNQ

SEQ ID NO: 1008 - protein, 24 aa, Grammistes sexlineatus
LFGFLIPLLPHIIGAIPQVIGAIR

SEQ ID NO: 1009 - protein, 13 aa, Pogonoperca punctata
FIGGIISFFKRLF

SEQ ID NO: 1010 - protein, 13 aa, Pogonoperca punctata
FIGGIISLIKKLF

SEQ ID NO: 1011 - protein, 13 aa, Pogonoperca punctata
FIGGIISFIKKLF

SEQ ID NO: 1012 - protein, 25 aa, Pogonoperca punctata
NWRKILGQIASVGAGLLGSLLAGYE

SEQ ID NO: 1013 - protein, 24 aa, Pogonoperca punctata
LFGFLIPLLPHIIGAIPQVIGAIR

SEQ ID NO: 1014 - protein, 24 aa, Pogonoperca punctata
LFGFLIPLLPHLIGAIPQVIGAIR

SEQ ID NO: 1015 - protein, 26 aa, Grammistes sexlineatus
NWRKILGKIAKVAAGLLGSMLAGYQV

SEQ ID NO: 1016 - protein, 13 aa, Grammistes sexlineatus
FIGGIISFIKKLF

SEQ ID NO: 1017 - protein, 123 aa, Homo sapiens
RLSPEYYDLARAHLRDEEKSCPCLAQEGPQGDLLTKTQELGRDYRTCLTIVQKLKKMVDKPTQRSVSNAATRVCRTGRSRWRDVCRNFMRRYQSRVTQGLVAGETAQQICEDLRLCIPSTGPL

SEQ ID NO: 1018 - protein, 12 aa, Artificial Sequence
  Description of Artificial Sequence: Synthetic Anti-viral polypeptide
  MOD_RES (2)..(2): Any amino acid
  MOD_RES (11)..(11): Any amino acid
VXLFPKKPFLXV

SEQ ID NO: 1019 - protein, 41 aa, Hadrurus aztecus
GILDTIKSIASKVWNSKTVQDLKRKGINWVANKLGVSPQAA

SEQ ID NO: 1020 - protein, 26 aa, Hippoglossus sp.
GFLGILFHGVHHGRKKALHMNSERRS

SEQ ID NO: 1021 - protein, 24 aa, Hippoglossus sp.
FLGLLFHGVHHVGKWIHGLIHGHH

SEQ ID NO: 1022 - protein, 15 aa, Halocynthia aurantium
ALLHHGLNCAKGVLA

SEQ ID NO: 1023 - protein, 18 aa, Halocynthia aurantium
WLNALLHHGLNCAKGVLA

SEQ ID NO: 1024 - protein, 15 aa, Halobacterium sp.
  Halobacterium sp. AS7092
DIDITGCSACKYAAG

SEQ ID NO: 1025 - protein, 313 aa, Haloferax mediterranei
DIAPPGPNGDPKSVQIDDKYTGAEMYGEGDFRVGLGTDLTMYPPVYRESLGNGSGGWEFDFTVCGSTACRFVDSNGDVKEDDKAKEMWWQEINFNDINQDLYSRNDSDWVGSTPADTQPEFDYTDFALARDGVTLALTALNPAMGSLALGATYFLSDMVNWIASQHEDDSSLKRKWDYDGLSGPLYADSSTYLLARDEMTSNSYESFTIDNIAVAFPEFPVRTKYYVTFTAPDDPSTQSISTLEEEGIYRVPATEVAAARPPGSRRSKSAADEMVYVADPKKFIEVEPVKNPSIPDRIYEEIEQKKKQRSRKQ

SEQ ID NO: 1026 - protein, 36 aa, Unknown
  Description of Unknown: Haloarchaeon S8a polypeptide
SDCNINSNTAADVILCFNQVGSCALCSPTLVGGPVP

SEQ ID NO: 1027 - protein, 22 aa, Hediste diversicolor
LGAWLAGKVAGTVATYAWNRYV

SEQ ID NO: 1028 - protein, 44 aa, Heliothis virescens
DKLIGSCVWGAVNYTSDCNGECLLRGYKGGHCGSFANVNCWCET

SEQ ID NO: 1029 - protein, 22 aa, Heliothis virescens
QRFIHPTYRPPPQPRRPVIMRA

SEQ ID NO: 1030 - protein, 133 aa, Pyrrhocoris apterus
DVELKGKGGENEGFVGLKAQRNLYEDDRTSLSGTVKGQSQWKDPYPAQHAGMARLDGTRTLIENDRTKVTGSGFAQREVATGMRPHDSFGVGVEATHNIYKGKNGEVDVFGGVQRQWNTPDRHQARGGIRWRF

SEQ ID NO: 1031 - protein, 21 aa, Morone chrysops x Morone saxatilis
GCRFCCNCCPNMSGCGVCCRF

SEQ ID NO: 1032 - protein, 21 aa, Larimichthys crocea
RCRFCCRCCPRMRGCGICCRF

SEQ ID NO: 1033 - protein, 25 aa, Oncorhynchus mykiss
  MOD_RES (1)..(1): Any amino acid
  MOD_RES (19)..(19): Any amino acid
XSHLSLCRWCCNCCHNKGXGFCCKF

SEQ ID NO: 1034 - protein, 20 aa, Homo sapiens
ICIFCCGCCHRSKCGMCCKT

SEQ ID NO: 1035 - protein, 25 aa, Homo sapiens
DTHFPICIFCCGCCHRSKCGMCCKT

SEQ ID NO: 1036 - protein, 39 aa, Gallus gallus
GRKSDCFRKSGFCAFLKCPSLTLISGKCSRFYLCCKRIR

SEQ ID NO: 1037 - protein, 76 aa, Heterometrus laoticus
GWINEEKIQKKIDEKIGNNILGGMAKAVVHKLAKGEFQCVANIDTMGNCETHCQKTSGEKGFCHGTKCKCGKPLSY

SEQ ID NO: 1038 - protein, 38 aa, Myxine glutinosa
GFFKKAWRKVKHAGRRVLDTAKGVGRHYVNNWLNRYRZ

SEQ ID NO: 1039 - protein, 31 aa, Myxine glutinosa
GWFKKAWRKVKNAGRRVLKGVGIHYGVGLIZ

SEQ ID NO: 1040 - protein, 76 aa, Hadrurus gertschi
GWMSEKKVQGILDKKLPEGIIRNAAKAIVHKMAKNQFGCFANVDVKGDCKRHCKAEDKEGICHGTKCKCGVPISYL

SEQ ID NO: 1041 - protein, 84 aa, Hadrurus gertschi
GILREKYAHKAIDVLTPMIGVPVVSKIVNNAAKQLVHKIAKNQQLCMFNKDVAGWCEKSCQQSAHQKGYCHGTKCKCGIPLNYK

SEQ ID NO: 1042 - protein, 38 aa, Pieris rapae
KWKIFKKIEHMGQNIRDGLIKAGPAVQVVGQAATIYKG

SEQ ID NO: 1043 - protein, 51 aa, Hippoglossus hippoglossus
SGRGKTGGKARAKAKTRSSRAGLQFPVGRVHRLLRKGNYAHRVGAGAPVYL

SEQ ID NO: 1044 - protein, 38 aa, Macaca fascicularis
DSHEERHHGRHGHHKYGRKFHEKHHSHRGYRSNYLYDN

SEQ ID NO: 1045 - protein, 12 aa, Oncorhynchus mykiss
AERVGAGAPVYL

SEQ ID NO: 1046 - protein, 20 aa, Ictalurus punctatus
  MOD_RES (19)..(19): Any amino acid
PDPAKTAPKKGSKKAVTKXA

SEQ ID NO: 1047 - protein, 17 aa, Ictalurus punctatus
PDPAKTAPKKKSKKAVT

SEQ ID NO: 1048 - protein, 125 aa, Homo sapiens
PEPAKSAPAPKKGSKKAVTKAQKKDGKKRKRSRKESYSVYVYKVLKQVHPDTGISSKAMGIMNSFVNDIFERIAGEASRLAHYNKRSTITSREIQTAVRLLLPGELAKHAVSEGTKAVTKYTSAK

SEQ ID NO: 1049 - protein, 37 aa, Hylobates sp.; identical to SEQ ID NO: 192

SEQ ID NO: 1050 - protein, 43 aa, Holotrichia diomphalia
VTCDLLSLQIKGIAINDSACAAHCLAMRRKGGSCKQGVCVCRN

SEQ ID NO: 1051 - protein, 72 aa, Holotrichia diomphalia
SLQPGAPSFPMPGSQLPTSVSGNVEKQGRNTIATIDAQHKTDRYDVRGTWTKVVDGPGRSKPNFRIGGSYRW

SEQ ID NO: 1052 - protein, 84 aa, Holotrichia diomphalia
YGPGDGHGGGHGGGHGGGHGNGQGGGHGHGPGGGFGGGHGGGHGGGGRGGGGSGGGGSPGHGAGGGYPGGHGGGHHGGYQTHGY

SEQ ID NO: 1053 - protein, 99 aa, Sus scrofa
RRFPWWWPFLRRPRLRRQAFPPPNVPGPRFPPPNVPGPRFPPPNFPGPRFPPPNFPGPRFPPPNFPPPFPPPIFPGPWFPPPPPFRPPPFGPPRFPGRR

SEQ ID NO: 1054 - protein, 128 aa, Hordeum vulgare
QYSVGGGYNDVGGGGGSQQCPQERPNLGSCKDYVMERCFTMKDFPLTWPTKWWKGGCEQEVREKCCQQLSQIAPQCRCDAIRGVIQGKLGGIFGIGGGDVFKQIQRAQILPSKCNMGADCKFPSGYYW

SEQ ID NO: 1055 - protein, 32 aa, Homo sapiens
AFTCHCRRSCYSTEYSYGTCTVMGINHRFCCL

SEQ ID NO: 1056 - protein, 39 aa, Homo sapiens
DPVTCLKSGAICHPVFCPRRYKQIGTCGLPGTKCCKKPP

SEQ ID NO: 1057 - protein, 41 aa, Homo sapiens
GIGDPVTCLKSGAICHPVFCPRRYKQIGTCGLPGTKCCKKP

SEQ ID NO: 1058 - protein, 48 aa, Artificial Sequence
  Description of Artificial Sequence: Synthetic Anti-viral polypeptide
ELDRICGYGTARCRKKCRSQEYRIGRCPNTYACCLRKWDESLLNRTKP

SEQ ID NO: 1059 - protein, 30 aa, Homo sapiens
ACYCRIPACIAGERRYGTCIYQGRLWAFCC

SEQ ID NO: 1060 - protein, 11 aa, Homo sapiens
FQWQRNMRKVR

SEQ ID NO: 1061 - protein, 14 aa, Hypsiboas punctatus
GILDAIKAIAKAAG

SEQ ID NO: 1062 - protein, 93 aa, Apis mellifera
QERGSIVIQGTKEGKSRPSLDIDYKQRVYDKNGMTGDAYGGLNIRPGQPSRQHAGFEFGKEYKNGFIKGQSEVQRGPGGRLSPYFGINGGFRF

SEQ ID NO: 1063 - protein, 35 aa, Hyphantria cunea
RWKIFKKIERVGQNVRDGIIKAGPAIQVLGTAKAL

SEQ ID NO: 1064 - protein, 35 aa, Hyphantria cunea
RWKFFKKIERVGQNVRDGLIKAGPAIQVLGAAKAL

SEQ ID NO: 1065 - protein, 35 aa, Hyphantria cunea
RWKVFKKIEKVGRNIRDGVIKAGPAIAVVGQAKAL

SEQ ID NO: 1066 - protein, 35 aa, Hyphantria cunea
RWKVFKKIEKVGRHIRDGVIKAGPAITVVGQATAL

SEQ ID NO: 1067 - protein, 20 aa, Impatiens balsamina
QWGRRCCGWGPGRRYCVRWC

SEQ ID NO: 1068 - protein, 20 aa, Impatiens balsamina
QYGRRCCNWGPGRRYCKRWC

SEQ ID NO: 1069 - protein, 20 aa, Impatiens balsamina
QYRHRCCAWGPGRKYCKRWC

SEQ ID NO: 1070 - protein, 20 aa, Impatiens balsamina
QWGRRCCGWGPGRRYCRRWC

SEQ ID NO: 1071 - protein, 13 aa, Bos taurus
ILPWKWPWWPWRR

SEQ ID NO: 1072 - protein, 13 aa, Unknown
  Description of Unknown: Anti-viral polypeptide
  MOD_RES (13)..(13): Any amino acid
ILAWKWAWWAWRX

SEQ ID NO: 1073 - protein, 32 aa, Protophormia terraenovae
GTGINHSACAAHCLLRGNRGGYCNGKGVCVCR

SEQ ID NO: 1074 - protein, 23 aa, Ixodes sinensis
GLHKVMREVLGYERNSYKKFFLR

SEQ ID NO: 1075 - protein, 32 aa, Ixodes sinensis
QLKVDLWGTRSGIQPEQHSSGKSDVRRWRSRY

SEQ ID NO: 1076 - protein, 32 aa, Ixodes sinensis; identical to SEQ ID NO: 1075

SEQ ID NO: 1077 - protein, 14 aa, Rana japonica
FFPIGVFCKIFKTC

SEQ ID NO: 1078 - protein, 21 aa, Rana japonica
FGLPMLSILPKALCILLKRKC

SEQ ID NO: 1079 - protein, 8 aa, Apis mellifera
PFKISIHL

SEQ ID NO: 1080 - protein, 9 aa, Apis mellifera
TPFKISIHL

SEQ ID NO: 1081 - protein, 9 aa, Apis mellifera
EPFKISIHL

SEQ ID NO: 1082 - protein, 29 aa, Oldenlandia affinis
VCGETCVGGTCNTPGCTCSWPVCTRNGLP

SEQ ID NO: 1083 - protein, 20 aa, Kassina maculata
FLGAIAAALPHVINAVTNAL

SEQ ID NO: 1084 - protein, 20 aa, Kassina maculata
FFGAIAAALPHVISAIKNAL

SEQ ID NO: 1085 - protein, 20 aa, Kassina maculata
FVGAIAAALPHVISAIKNAL

SEQ ID NO: 1086 - protein, 21 aa, Kassina maculata
IIGAIAAALPHVINAIKNTFG

SEQ ID NO: 1087 - protein, 21 aa, Kassina senegalensis
GFMKYIGPLIPHAVKAISDLI

SEQ ID NO: 1088 - protein, 12 aa, Artificial Sequence
  Description of Artificial Sequence: Synthetic Anti-viral polypeptide
KRIVQRIKDFLR

SEQ ID NO: 1089 - protein, 39 aa, Lactococcus lactis
SIWGDIGQGVGKAAYWVGKAMGNMSDVNQASRINRKKKH

SEQ ID NO: 1090 - protein, 39 aa, Lactococcus lactis; identical to SEQ ID NO: 1089
  Lactococcus lactis QU 4

SEQ ID NO: 1091 - protein, 35 aa, Lactococcus lactis
  Lactococcus lactis QU 4
KKWGWLAWVEPAGEFLKGFGKGAIKEGNKDKWKNI

SEQ ID NO: 1092 - protein, 142 aa, Anguilla japonica
AVLGLCEGACPEGWVEHKNRCYLHVAEKKTWLDAELNCLHHGGNLASEHSEDEHQFLKDLHKGSDDPFWIGLSAVHEGRSWLWSDGTSASAEGDFSMWNPGEPNDAGGKEDCVHDNYGGQKHWNDIKCDLLFPSICVLRMVE

SEQ ID NO: 1093 - protein, 25 aa, Bos taurus
FKCRRWQWRMKKLGAPSITCVRRAF

SEQ ID NO: 1094 - protein, 101 aa, Limulus polyphemus
DGIWTQLIFTLVKNLATLWQSGDFQFLDHECHYRIKPTFRRLKWKYKGKFWCPSWTSITGRATKSSRSGAVEHSVRNFVGQAKSSGLITQRQAEQFISQYN

SEQ ID NO: 1095 - protein, 24 aa, Protobothrops mucrosquamatus
ADNKNPLEECFRETNYEEFLEIAR

SEQ ID NO: 1096 - protein, 498 aa, Calloselasma rhodostoma
ADDRNPLAECFQENDYEEFLEIARNGLKATSNPKHVVIVGAGMAGLSAAYVLAGAGHQVTVLEASERPGGRVRTYRNEEAGWYANLGPMRLPEKHRIVREYIRKFDLRLNEFSQENDNAWYFIKNIRKKVGEVKKDPGLLKYPVKPSEAGKSAGQLYEESLGKVVEELKRTNCSYILNKYDTYSTKEYLIKEGDLSPGAVDMIGDLLNEDSGYYVSFIESLKHDDIFAYEKRFDEIVDGMDKLPTAMYRDIQDKVHFNAQVIKIQQNDQKVTVVYETLSKETPSVTADYVIVCTTSRAVRLIKFNPPLLPKKAHALRSVHYRSGTKIFLTCTTKFWEDDGIHGGKSTTDLPSRFIYYPNHNFTNGVGVIIAYGIGDDANFFQALDFKDCADIVFNDLSLIHQLPKKDIQSFCYPSVIQKWSLDKYAMGGITTFTPYQFQHFSDPLTASQGRIYFAGEYTAQAHGWIDSTIKSGLRAARDVNLASENPSGIHLSNDNEL

SEQ ID NO: 1097 - protein, 38 aa, Naja kaouthia
  MOD_RES (31)..(31): Any amino acid
  MOD_RES (37)..(37): Any amino acid
DDRRSPLEECFQQNDYEEFLEIAKNGLKKTXNPKHVXV

SEQ ID NO: 1098 - protein, 499 aa, Demansia vestigiata
ADDRRNPLGECFREADYEEFVDIATNGLKQTSNPKRVVVVGAGMAGLSAAYVLAGAGHNVMLLEASERVGGRVNTYRNEQEGWYVNLGPMRLPERHRIVREYIKKFGLQLNQFFQEDEDAWYFIKNIRKKVREVKENPSIFPYPVKPSEKGKSAPQLYRDSLQKIIEEYGRSNCSYILNKYDTYSTKDYLIKEGNLSPGAVDMIGDLLNEGSSYYLSFIESLKSDDIFSYENRFDEIVGGFDLLPKAMYKAIEEKVHLNARVIQIQQNAEGVRVTYQTPAKNLSYVTADYVIVCSTSRAARRIYFEPPLPPEKAHALQSIHYRSATKIFLTCTKKFWEDDGIHGGKSITDRPSRLIHYPNHNFPNGIGVLVIYTIADDADFFLALDNKTIADIVIHDLSLIHQLPKEKIRDLCYVSMIKKWSLDKYSMGSITTFAPYQFQEYFETVAAPVGRIYFAGEYTARAHGWIDSTIKSGLKAARDVNRASQKPSRIQLSNDNEL

SEQ ID NO: 1099 - protein, 498 aa, Crotalus atrox
AHDRNPLEECFRETDYEEFLEIAKNGLTATSNPKRVVIVGAGMAGLSAAYVLAGAGHQVTVLEASERVGGRVRTYRKKDWYANLGPMRLPTKHRIVREYIKKFDLKLNEFSQENENAWYFIKNIRKRVREVKNNPGLLEYPVKPSEEGKSAAQLYVESLRKVVKELKRTNCKYILDKYDTYSTKEYLLKEGNLSPGAVDMIGDLLNEDSGYYVSFIESLKHDDIFGYEKRFDEIVGGMDQLPTSMYEAIKEKVQVHFNARVIEIQQNDREATVTYQTSANEMSSVTADYVIVCTTSRAARRIKFEPPLPPKKAHALRSVHYRSGTKIFLTCKKKFWEDDGIRGGKSTTDLPSRFIYYPNHNFTSGVGVIIAYGIGDDANFFQALDFKDCADIVINDLSLIHQLPKEDIQTFCRPSMIQRWSLDKYAMGGITTFTPYQFQHFSEALTAPFKRIYFAGEYTAQFHGWIDSTIKSGLTAARDVNRASENPSGIHLSNDNEF

SEQ ID NO: 1100 - protein, 499 aa, Oxyuranus scutellatus
  Oxyuranus scutellatus scutellatus
ADVRRNPLEECFREADYEEFLEIARNGLKKTSNPKHVVVVGAGMAGLSAAYVLAGAGHKVTLLEASERVGGRVHTYRNEKEGWYVNLGPMRLPERHRIIREYIRKFGLKLNEFFQENENAWYFIRNIRKRVWEVKKDPGVFKYPVKPSEEGKSASQLYRESLKKVIEELKRTNCSYILNKYDTYSTKEYLIKEGNLSRGAVDMIGDLLNEDSSYYLSFIESLKSDDLFSYEKRFDEIVGGFDQLPISMYQAIAEMVHLNAQVIKIQHNAEKVRVAYQTPAKTLSYVTADYVIVCSSSRAARRIYFEPPLPPKKAHALRSIHYKSGTKIFLTCSKKFWEADGIHGGKSTTDLPSRFIYYPNHNFTSGVGVIVAYTISDDADFFQSLDIKTSADIVINDLSLIHQLPKKEIQALCYPSMIKKWSLDKYAMGSITSFAPYQFQDFIERVAAPVGRIYFAGEYTARVHGWLDSTIKSGLTAARDVNRASQKPSRRQLSNDNEL

SEQ ID NO: 1101 - protein, 499 aa, Pseudechis australis
ADDRRRPLEECFREADYEEFLEIAKNGLQRTSNPKRVVVVGAGMAGLSAAYVLAGAGHQVTLLEASERVGGRVNTYRNEKDGWYVNLGPMRLPERHRIIREYIRKFGLELNEFIQENDNAWYFIKNIRKRVSEVKKDPGVFKYPVKPSEEGKSASQLYRESLQKVIEELKRTNCSYILNKYDTYSTKEYLIKEGNLSPGAVDMIGDLLNEDSSYYLSFIESLKSDDIFSYEKRFDEIVGGFDQLPRSMYQAIAEKVHLNAQVIKIQQNAEDVRVTYQTPAKTLSYVIADYVIVCSTSRAARRIHFEPPLPPKKAHALRSIHYRSSTKIFLTCSQKFWEADGIHGGKSTTDLPSRFIYYPNHSFTSGIGVIVAYTLADDTDFFQALDIETSADIVINDLSLIHQLPKEQIQALCYPSKIQKWSLDEYAMGAITSFTPYQFQDFFEIVAAPVGRIYFAGEYTASVHGWLDSTIKSGLTAARDVNLASQKPSRIQLSNDNEL

SEQ ID NO: 1102 - protein, 499 aa, Notechis scutatus
  Notechis scutatus scutatus
ADDRRRPLEECFQEADYEEFLEIARNGLNETSNPKHVVVVGAGMAGLSAAYVLAGAGHNVTLLEASERVGGRVNTYRNETEGWYVNLGPMRLPERHRIIREYIRKFGLKLNEFLQENENAWYFIRNIRKRVWEVKKDPGVFKYPVEPSEEGKSASQLYRESLEKVIEELKRTNCSYILNKYDTYSTKEYLIKEGNLSRGAVDMIGKLPNEDSSYYLSFIESLKSDDLFSYEKRFDEIVGGFDQLPISMYQAIAEMVHLNAQVIKIQHNAEEVRVAYQTPAKTLSYVTADYVIVCSTSRAARRIYFEPPLPPKKAHALRSIHYRSGTKIFLTCTRKFWEADGIHGGKSTTDLPSRFIYYPNHNFTSDVGVIVAYTLADDADFFQALDIKTSADIVINDLSLIHQLPKEEIQALCYPSMIKKWSLDKYAMGAITSFTPYQFQDFIETVAAPVGRIYFAGEYTARVHGWLDSTIKSGLTAARDVNRASQKPSRRQLSNDNEL

SEQ ID NO: 1103 - protein, 392 aa, Daboia russelli
  Daboia russelli siamensis
HRIVREYIRKFGLKLNEFVQETENGWYFIKNIRKRVGEVKKDPGLLKYPVKPSEAGKSAGQLYQESLGKAVEELKRTNCSYILNKYDTYSTKEYLIKEGNLSPGAVDMIGDLLNEDSGYYVSFIESLKHDDIFAYEKRFDEIVGGMDQLPTSMYRAIEESVRFKARVIKIQQNAEKVTVTYQTTQKNLLLETVDYVIVCTTSRAARRITFKPPLPPKKAHALRSVHYRSGTKIFLTCTKKFWEDDGIQGGKSTTDLPSRFIYYPNHNFTTGVGVIIAYGIGDDANFFQALNLNECADIVFNDLSSIHQLPKKDLQTFCYPSIIQKWSLDKYAMGAITTFTPYQFQHFSEALTAPVGRIFFAGEYTANAHGWIDSTIKSGLTAARDVNRASEL

SEQ ID NO: 1104 - protein, 484 aa, Bothrops jararacussu
ADDRNPLEECFRETDYEEFLEIAKNGLSTTSNPKRVVIVGAGMSGLSAAYVLANAGHQVTVLEASERAGGQVKTYRNEKEGWYANLGPMRLPEKHRIVREYIRKFGLQLNEFSQENENAWYFIKNIRKRVGEVNKDPGVLDYPVKPSEVGKSAGQLYEESLQKAVEELRRTNCSYMLNKYDTYSTKEYLLKEGNLSPGAVDMIGDLLNEDSGYYVSFIESLKHDDIFAYEKRFDEIVGGMDKLPTSMYQAIQEKVHLNARVIKIQQDVKEVTVTYQTSEKETLSVTADYVIVCTTSRAARRIKFEPPLPPKKAHALRSVHYRSGTKIFLTCTKKFWEDDGIHGGKSTTDLPSRFIYYPNHNFPNGVGVIIAYGIGDDANYFEALDFEDCGDIVINDLSLIHQLPKEEIQAICRPSMIQRWSLDKYAMGGITTFTPYQFQHFSEALTAPVDRIYFAGEYTAQAHGWIASTIKSGPEGLDVNRASE

SEQ ID NO: 1105 - protein, 472 aa, Bothrops moojeni
ADDRNPLEECFRETDYEEFLEIAKNGLSTTSNPKRVVIVGAGMSGLSAAYVLANAGHQVTVLEASERAGGRVKTYRNEKEGWYANLGPMRLPEKHRIVREYIRKFDLQLNEFSQENENAWYFIKNIRKRVGEVNKDPGVLEYPVKPSEVGKSAGQLYEESLQKAVEELRRTNCSYMLNKYDTYSTKEYLLKEGNLSPGAVDMIGDLLNEDSGYYVSFIESLKHDDIFAYEKRFDEIVGGMDKLPTSMYQAIQEKVHLNARVIKIQQDVKEVTVTYQTSEKETLSVTADYVIVCTTSRAARRIKFEPPLPPKKAHALRSVHYRSGTKIFLTCTKKFWEDDGIHGGKSTTDLPSRFIYYPNHNFPNGVGVIIAYGIGDDANYFQALDFEDCGDIVINDLSLIHQLPKEEIQAICRPSMIQRWSLDKYAMGGITTFTPYQFQHFSEALTAPVDRIYFAGEYTAQAHGWIDSTIKW

SEQ ID NO: 1106 - protein, 486 aa, Gloydius halys
  Agkistrodon halys pallas
ANDRNPLEECFRETDYEEFLEIARNGLKATSNPKHVVVVGAGMSGLSAAYVLSGAGHQVTVLEASERAGGRVRTYRNDKEDWYANLGPMRLPEKHRIVREYIRKFGLQLNEFSQENDNAWYFIKNIRKRVGEVKKDPGVLKYPVKPSEEGKSAGQLYEESLGKVVEELKRTNCSYILNKYDTYSTKEYLLKEGNLSPGAVDMIGDLMNEDSGYYVSFPESLRHDDIFAYEKRFDEIVGGMDKLPTSMYRAIEEKVHLNAQVIKIQKNAEKVTVVYQTPAKEMASVTADYVIVCTTSRATRRIKFEPPLPPKKAHALRSVHYRSGTKIFLTCTKKFWEDEGIHGGKSTTDLPSRFIYYPNHNFTSGVGVIIAYGIGDDANFFQALDFKDCADIVINDLSLIHQLPREEIQTFCYPSMIQKWSLDKYAMGGITTFTPYQFQHFSESLTASVDRIYFAGEHTAEAHGWIDSTIKSGLRAARDVNRASEQ

SEQ ID NO: 1107 - protein, 486 aa, Gloydius halys
  Agkistrodon halys blomhoffi
ADDRNPLEECFRETDYEEFLEIARNGLKATSNPKHVVIVGAGMSGLSAAYVLSGAGHQVTVLEASERAGGRVRTYRNDKEGWYANLGPMRLPEKHRIVREYIRKFGLQLNEFSQENDNAWYFIKNIRKRVGEVKKDPGVLKYPVKPSEEGKSAGQLYEESLGKVVEELKRTNCSYILNKYDTYSTKEYLLKEGNLSPGAVDMIGDLMNEDSGYYVSFPESLRHDDIFAYEKRFDEIVGGMDKLPTSMYRAIEEKVHLNAQVIKIQKNAEKVTVVYQTPAKEMASVTADYVIVCTTSRATRRIKFEPPLPPKKAHALRSVHYRSGTKIFLTCTKKFWEDEGIHGGKSTTDLPSRFIYYPNHNFTSGVGVIIAYGIGDDANFFQALDFKDCADIVINDLSLIHQLPREEIQTFCYPSMIQKWSLDKYAMGGITTFTPYQFQHFSEPLTASVDRIYFAGEHTAEAHGWIDSTIKSGLRAARDVNRASEQ

SEQ ID NO: 1108 - protein, 498 aa, Crotalus adamanteus
AHDRNPLEECFRETDYEEFLEIAKNGLTATSNPKRVVIVGAGMAGLSAAYVLAGAGHQVTVLEASERVGGRVRTYRKKDWYANLGPMRLPTKHRIVREYIKKFDLKLNEFSQENENAWYFIKNIRKRVREVKNNPGLLEYPVKPSEEGKSAAQLYVESLRKVVEELRSTNCKYILDKYDTYSTKEYLLKEGNLSPGAVDMIGDLLNEDSGYYVSFIESLKHDDIFGYEKRFDEIVGGMDQLPTSMYEAIKEKVQVHFNARVIEIQQNDREATVTYQTSANEMSSVTADYVIVCTTSRAARRIKFEPPLPPKKAHALRSVHYRSGTKIFLTCTKKFWEDDGIHGGKSTTDLPSRFIYYPNHNFTSGVGVIIAYGIGDDANFFQALDFKDCADIVINDLSLIHELPKEDIQTFCHPSMIQRWSLDKYAMGGITTFTPYQFQHFSEALTAPFKRIYFAGEYTAQFHGWIDSTIKSGLTAARDVNRASENPSGIHLSNDNEF

SEQ ID NO: 1109 - protein, 27 aa, Eristocophis macmahoni
ADDKNPLEEAFREADYEVFLEIAKNGL

SEQ ID NO: 1110 - protein, 60 aa, Bitis gabonica
GPMRIPEKHRIVREYIRKFGLQLNEFVQETENAWYYIKNIRKKVHEVKKDPGLLKYPVKP

SEQ ID NO: 1111 - protein, 19 aa, Ophiophagus hannah
HVINLEESFQEPEYENHLA

SEQ ID NO: 1112 - protein, 61 aa, Crotalus durissus
  Crotalus durissus cascavella
ADDRNPLEQCFRETDYEEFLEIARNNLKATSNPKHVVIVGAGMAGLSAAYVLSGGGHQVTV

SEQ ID NO: 1113 - protein, 49 aa, Bothrops pirajai
ADDKNPLEEFRETNYEVFLEIAKNGLKATSNPKRVVIVGAGMAGLSAAY

SEQ ID NO: 1114 - protein, 24 aa, Blautia hansenii
GNGVLKTISHECNMNTWQFLFTCC

SEQ ID NO: 1115 - protein, 31 aa, Staphylococcus epidermidis
SASIVKTTIKASKKLCRGFTLTCGCHFTGKK

SEQ ID NO: 1116 - protein, 27 aa, Lactococcus lactis
  subsp. lactis
KGGSGVIHTISHECNMNSWQFVFTCCS

SEQ ID NO: 1117 - protein, 21 aa, Clavibacter michiganensis
  subsp. michiganensis
SSSGWLCTLTIECGTIICACR

SEQ ID NO: 1118 - protein, 27 aa, Streptococcus mutans
NRWWQGVVPTVSYECRMNSWQHVFTCC

SEQ ID NO: 1119 - protein, 34 aa, Lactococcus lactis
  subsp. lactis
ITSISLCTPGCKTGALMGCNMKTATCHCSIHVSK

SEQ ID NO: 1120 - protein, 31 aa, Streptococcus uberis
ITSKSLCTPGCKTGILMTCPLKTATCGCHFG

SEQ ID NO: 1121 - protein, 34 aa, Lactococcus lactis
  subsp. lactis
ITSISLCTPGCKTGALMGCNMKTATCNCSIHVSK

SEQ ID NO: 1122 - protein, 27 aa, Staphylococcus warneri
KKKSGVIPTVSHDCHMNSFQFVFTCCS

SEQ ID NO: 1123 - protein, 30 aa, Paenibacillus polymyxa
ASIIKTTIKVSKAVCKTLTCICTGSCSNCK

SEQ ID NO: 1124 - protein, 34 aa, Staphylococcus epidermidis
TAGPAIRASVKQCQKTLKATRLFTVSCKGKNGCK

SEQ ID NO: 1125 - protein, 22 aa, Streptococcus salivarius
KRGSGWIATITDDCPNSVFVCC

SEQ ID NO: 1126 - protein, 26 aa, Streptococcus pyogenes
GKNGVFKTISHECHLNTWAFLATCCS

SEQ ID NO: 1127 - protein, 32 aa, Bacillus subtilis
WKSESLCTPGCVTGALQTCFLQTLTCNCKISK

SEQ ID NO: 1128 - protein, 24 aa, Lachesana tarabaevi
GLKDKFKSMGEKLKQYIQTWKAKF

SEQ ID NO: 1129 - protein, 25 aa, Lachesana tarabaevi
SMWSGMWRRKLKKLRNALKKKLKGE

SEQ ID NO: 1130 - protein, 26 aa, Lachesana tarabaevi
GLFGKLIKKFGRKAISYAVKKARGKH

SEQ ID NO: 1131 - protein, 26 aa, Lachesana tarabaevi
GLFGKLIKKFGRKAISYAVKKARGKN

SEQ ID NO: 1132 - protein, 20 aa, Lachesana tarabaevi
SWKSMAKKLKEYMEKLKQRA

SEQ ID NO: 1133 - protein, 20 aa, Lachesana tarabaevi
SWASMAKKLKEYMEKLKQRA

SEQ ID NO: 1134 - protein, 24 aa, Lachesana tarabaevi
GLKDKFKSMGEKLKQYIQTWKAKF

SEQ ID NO: 1135 - protein, 24 aa, Lachesana tarabaevi
SLKDKVKSMGEKLKQYIQTWKAKF

SEQ ID NO: 1136 - protein, 28 aa, Lachesana tarabaevi
GFFGKMKEYFKKFGASFKRRFANLKKRL

SEQ ID NO: 1137 - protein, 114 aa, Tachypleus tridentatus
QIPGGWIDANVGDTDVKEAARFATEAQSSRSNSLYHHKLLKIHKARTQVVSGINYEVFIETGTTTCKKSEVPLEDLKRCAVPENGVKHLCQAIVWVQAWIPRTKVTKLECQNKG

SEQ ID NO: 1138 - protein, 32 aa, Bombyx mori
DLRFLYPRGKLPVPTPPPFNPKPIYIDMGNRY

SEQ ID NO: 1139 - protein, 32 aa, Bombyx mori
DLRFLYPRGKLPVPTLPPFNPKPIYIDMGNRY

SEQ ID NO: 1140 - protein, 32 aa, Bombyx mori
DLRFWNPREKLPLPTLPPFNPKPIYIDMGNRY

SEQ ID NO: 1141 - protein, 42 aa, Galleria mellonella
EADEPLWLYKGDNIERAPTTADHPILPSIIDDVKLDPNRRYA

SEQ ID NO: 1142 - protein, 221 aa, Tachypleus tridentatus
VQWHQIPGKLMHITATPHFLWGVNSNQQIYLCRQPCYDGQWTQISGSLKQVDADDHEVWGVNRNDDIYKRPVDGSGSWVRVSGKLKHVSASGYGYIWGVNSNDQIYKCPKPCNGAWTQVNGRLKQIDGGQSMVYGVNSANAIYRRPVDGSGSWQQISGSLKHITGSGLSEVFGVNSNDQIYRCTKPCSGQWSLIDGRLKQCDATGNTIVGVNSVDNIYRSG

SEQ ID NO: 1143 - protein, 12 aa, Bacillus licheniformis
  MOD_RES (7)..(7): Any amino acid
ISLEICXIFHDN

SEQ ID NO: 1144 - protein, 46 aa, Phoradendron liga
KSCCPSTTARNIYNTCRLTGASRSVCASLSGCKIISGSTCDSGWNH

SEQ ID NO: 1145 - protein, 40 aa, Bubalus bubalis
VRNSQSCRRNKGICVPIRCPGSMRQIGTCLGAQVKCCRRK

SEQ ID NO: 1146 - protein, 36 aa, Bos taurus
NSQSCRRNKGICVPIRCPGSMRQIGTCLGAQVKCCR

SEQ ID NO: 1147 - protein, 40 aa, Bos taurus; identical to SEQ ID NO: 1145

SEQ ID NO: 1148 - protein, 266 aa, Brevibacterium linens
MNNLYRELAPIPGPAWAEIEEEARRTFKRNIAGRRIVDVAGPTGFETSAVTTGHIRDVQSETSGLQVKQRIVQEYIELRTPFTVTRQAIDDVARGSGDSDWQPVKDAATTIAMAEDRAILHGLDAAGIGGIVPGSSNAAVAIPDAVEDFADAVAQALSVLRTVGVDGPYSLLLSSAEYTKVSESTDHGYPIREHLSRQLGAGEIIWAPALEGALLVSTRGGDYELHLGQDLSIGYYSHDSETVELYLQETFGFLALTDESSVPLSL

SEQ ID NO: 1149 - protein, 157 aa, Homo sapiens
HHLLASDEEIQDVSGTWYLKAMTVDREFPEMNLESVTPMTLTTLEGGNLEAKVTMLISGRCQEVKAVLEKTDEPGKYTADGGKHVAYIIRSHVKDHYIFYCEGELHGKPVRGVKLVGRDPNNLEALEDFEKAAGARGLSTESILIPRQSETCSPGSD

SEQ ID NO: 1150 - protein, 43 aa, Listeria innocua
KSYGNGVQCNKKKCWVDWGSAISTIGNNSAANWATGGAAGWKS

SEQ ID NO: 1151 - protein, 13 aa, Unknown
  Description of Unknown: Anti-viral polypeptide
  MOD_RES (13)..(13): Any amino acid
FKRIVQRIKDFLX

SEQ ID NO: 1152 - protein, 37 aa, Artificial Sequence
  Description of Artificial Sequence: Synthetic Anti-viral polypeptide
LLGNFFRKSKQKIGKQFKRIVQRIKNFFRNLVPRTQS

SEQ ID NO: 1153 - protein, 13 aa, Unknown
  Description of Unknown: Anti-viral polypeptide
RLFDKIRQVIRKF

SEQ ID NO: 1154 - protein, 55 aa, Locusta migratoria
ATTGCSCPQCIIFDPICASSYKNGRRGFSSGCHMRCYNRCHGTDYFQISKGSKCI

SEQ ID NO: 1155 - protein, 29 aa, Lumbricus rubellus
RQKDKRPYSERKNQYTGPQFLYPPERIPP

SEQ ID NO: 1156 - protein, 18 aa, Lycosa singoriensis
GKLQAFLAKMKEIAAQTL

SEQ ID NO: 1157 - protein, 18 aa, Lycosa singoriensis
GRLQAFLAKMKEIAAQTL

SEQ ID NO: 1158 - protein, 26 aa, Lycosa singoriensis
KIKWFKTMKSLAKFLAKEQMKKHLGE

SEQ ID NO: 1159 - protein, 25 aa, Hogna carolinensis
IWLTALKFLGKHAAKHLAKQQLSKL

SEQ ID NO: 1160 - protein, 27 aa, Hogna carolinensis
KIKWFKTMKSIAKFIAKEQMKKHLGGE

SEQ ID NO: 1161 - protein, 300 aa, Eisenia fetida
MSSRAGIAEGYEQIEVDVVAVWKEGYVYENRGSTSVEQKIKITKGMRNLNSETKTLTASHSIGSTISTGDLFEIATVDVSYSYSHEESQVSMTETEVYESKEIEHTITIPPTSKFTRWQLNADVGGADIEYMYLIDEVTPIGGTLSIPQVIKSRAKILVGREIYLGETEIRIKHADRKEYMTVVSRKSWPAATLGHSKLYKFVLYEDMYGFRIKTLNTMYSGYEYAYSSDQGGIYFDQGSDNPKQRWAINKSLPLRHGDVVTFMNKYFTRSGLCYYDGPATDVYCLDKREDKWILEVVKP

SEQ ID NO: 1162 - protein, 300 aa, Eisenia fetida
MSATAVTADGLEEIEVDVVAVWKEGYVYENRGDTSVEQKITMTKGMKNLNSETKTLTATHTVGRTLKVGDPFEIGSVEVSYSFSHQESQVSMTQTEVYSSQVIEHTVTIPPTSKFTRWKLNADVGGTDIEYMYLIDEVTPISVTQTIPQVIRSRAKILVGRQIHLGTTAVRIKHAERQEYMTVIERKKWPAATLGKSNLFKFVLFEDSSGTRIKTLNTMYPGYEWAYSSDQGGVYFDESSDNPKQRWALSKALPLRHGDVVTFMNKYFTNSGLCYDDGPATNVYCLDKREDKWILEVVNP

SEQ ID NO: 1163 - protein, 296 aa, Pneumococcus phage
  Pneumococcus phage Dp 1
MGVDIEKGVAWMQARKGRVSYSMDFRDGPDSYDCSSSMYYALRSAGASSAGWAVNTEYMHAWLIENGYELISENAPWDAKRGDIFIWGRKGASAGAGGHTGMFIDSDNIIHCNYAYDGISVNDHDERWYYAGQPYYYVYRLTNANAQPAEKKLGWQKDATGFWYARANGTYPKDEFEYIEENKSWFYFDDQGYMLAEKWLKHTDGNWYWFDRDGYMATSWKRIGESWYYFNRDGSMVTGWIKYYDNWYYCDATNGDMKSNAFIRYNDGWYLLLPDGRLADKPQFTVEPDGLITAKV

SEQ ID NO: 1164 - protein, 198 aa, Entamoeba histolytica
KLGIDVSQPTSTSSFTCLRNKGFTTMVIVRAWKSTGSFDTNAPQTLKNANAAGFSIENSDVYYYPCISCGNMAGQVRTFWQKVGQYSLKVKRVWFDIEGTWTSSVSTNQNYLMQMMNEARAIGIVHGIYGSKYYWGNLFGSSYKYRYRSSTPLWYPHYDNSPSFSDFSSFGGWTSPSMKQYRGDVSVCSAGVDYNYKP

SEQ ID NO: 1165 - protein, 20 aa, Lysobacter sp.
  strain XL 1
  MOD_RES (7)..(7): Any amino acid
  MOD_RES (11)..(11): Any amino acid
IAIQGGXGYLXQPGDGYKYA

SEQ ID NO: 1166 - protein, 15 aa, Tityus stigmurus
SIYERCELARELINR

SEQ ID NO: 1167 - protein, 117 aa, Crassostrea virginica
SISDQCLRCICEVESGCRAIGCHWDVYSNSCGYFQIKQGYWTDCGSPGHSMESCADNYNCASGCVRSYMDHYIKYNGCADTCESYARMHNGGPNGCKSSHHHATDNYWRLVQAKGCS

SEQ ID NO: 1168 - protein, 119 aa, Dictyostelium discoideum
YSCPKPCYGNMCCSTSPNNQYYLTDFCGSTSACGPVPSCSGALYFTADSQRFGCGKYLNLCRSGKCVKAQIYDAGPAMWVEQDAGMMIIDASPTICHVLTGGSSCGWSDHFLITATVTS

SEQ ID NO: 1169 - protein, 119 aa, Dictyostelium discoideum
YSCPKPCYGNMCCSTSPGNKYYLTDFCGSTSACGPVPSCSGALYFTADSQRFGCGKHLNLCRGSKCVKAQIYDAGPAMWVEQDAGMMIIDASPTICHVLTGGSSCGWSDKFEITATVTS

SEQ ID NO: 1170 - protein, 130 aa, Bufo gargarizans
  Bufo gargarizans andrewsi
QKYERCELAKALKKGGLADFKGYSLENWICTAFHESGYNTASTNYNPPDKSTDYGIFQINSRWWCNDYKTPRSKNTCNIDCKVLLGDDISPAIKCAKRVVSDPNGMGAWVAWKKYCKGKNLSQWTQGCKL

SEQ ID NO: 1171 - protein, 119 aa, Dictyostelium discoideum
YSCPKPCYGNMCCSTSPDHKYYLTDFCGSTSACGPKPSCSGKLYFTADSQRFGCGKHLNLCRGKKCVKAKVYDAGPAEWVEKDAGKMIIDASPTICHELTGGSSCGWSDKFEITATVTS

SEQ ID NO: 1172 - protein, 241 aa, Dictyostelium discoideum
YSCSNPCYGNMCCSIPSNNEYYLTTFCDESTACGTPCSAQTYFTADSQRFGCGVTLTICSTSGGSTTTGGTGSAGTSTSSGSGSGSGSGSGSGSGSGSGTSGSSSSGSSSGSGSGSSSGSGGSSGSGSGSTMETGGFYGVCVKAITIDAGPNISVEEEAGMAIIDASSQICQDLFGSSSCGWSDKRSITAVQSSVEDGFPVNKPFNVTFEDYNKIISNSLILDQQCSNKNNCKYNKLELMK

SEQ ID NO: 1173 - protein, 164 aa, Crassostrea virginica
SDAPCLRAGGRCQHDSITCSGRYRTGLCSGGVRRRCCVPSSSNSGSFSTGMVSQQCLRCICNVESGCRPIGCHWDVNSDSCGYFQIKRAYWIDCGSPGGDWQTCANNLACSSRCVQAYMARYHRRSGCSNSCESFARIHNGGPRGCRNSNTEGYWRRVQAQGCN

SEQ ID NO: 1174 - protein, 21 aa, Litoria genimaculata
GLFGVLAKVAAHVVPAIAEHF

SEQ ID NO: 1175 - protein, 23 aa, Litoria genimaculata
GLFGVLAKVASHVVPAIAEHFQA

SEQ ID NO: 1176 - protein, 18 aa, Litoria genimaculata
GFVDFLKKVAGTIANVVT

SEQ ID NO: 1177 - protein, 26 aa, Litoria genimaculata
GLLQTIKEKLESLESLAKGIVSGIQA

SEQ ID NO: 1178 - protein, 23 aa, Xenopus laevis
GIGKFLHSAKKFGKAFVGEIMNS

SEQ ID NO: 1179 - protein, 23 aa, Xenopus laevis
GIGKFLHSAGKFGKAFVGEIMKS

SEQ ID NO: 1180 - protein, 42 aa, Unknown
  Description of Unknown: Anti-viral polypeptide
GKIPVKAIKQAGKVIGKGLRAINIAGTTHDVVSFFRPKKKKH

SEQ ID NO: 1181 - protein, 265 aa, Thermotoga maritima [sequence omitted]

SEQ ID NO: 1182 - protein, 265 aa, Thermotoga sp. [sequence omitted]

SEQ ID NO: 1183 - protein, 265 aa, Thermotoga petrophila
MEFLKRSFAPLTEKQWQEIDNRAREIFKTQLYGRKFVDVEGPYGWEYAAHPLGEVEVLSDENEVVKWGLRKSLPLIELRATFTLDLWELDNLERGKPNVDLSSLEETVRKVAEFEDEVIFRGCEKSGVKGLLSFEERKIECGSTPKDLLEAIVRALSIFSKDGIEGPYTLVINTDRWVSFLKEEAGHYPLEKRVEECLRGGKIITTPRIEDALVVSERGGDFKLILGQDLSIGYEDREKDAVRLFITETFTFQVVNPEALILLKF

SEQ ID NO: 1184 - protein, 14 aa, Polybia paulista
IDWKKLLDAAKQIL

SEQ ID NO: 1185 - protein, 14 aa, Vespa analis
IKWKAILDAVKKVL

SEQ ID NO: 1186 - protein, 14 aa, Vespa magnifica
INWKGIAAMAKKLL

SEQ ID NO: 1187 - protein, 13 aa, Vespa magnifica
INWKGIAAMKKLL

SEQ ID NO: 1188 - protein, 15 aa, Vespa magnifica
INLKAIAALAKKLLG

SEQ ID NO: 1189 - protein, 14 aa, Vespa magnifica
INLKAIAAMAKKLL

SEQ ID NO: 1190 - protein, 14 aa, Vespa tropica
INLKAIAAFAKKLL

SEQ ID NO: 1191 - protein, 15 aa, Vespula vulgaris
INWKKIKSIIKAAMN

SEQ ID NO: 1192 - protein, 15 aa, Vespula vulgaris
INWKKIKSLIKAAMS

SEQ ID NO: 1193 - protein, 14 aa, Protonectarina sylveirae
INWKALLDAAKKVL

SEQ ID NO: 1194 - protein, 27 aa, Bombina maxima
GIGTKILGGVKTALKGALKELASTYVN

SEQ ID NO: 1195 - protein, 20 aa, Bombina maxima
ILGPVISTIGGVLGGLLKNL

SEQ ID NO: 1196 - protein, 20 aa, Bombina maxima
LLGPVLGLVSNALGGLLKNI

SEQ ID NO: 1197 - protein, 20 aa, Bombina maxima
ILGPVLSMVGSALGGLIKKI

SEQ ID NO: 1198 - protein, 20 aa, Bombina maxima
ILGPVLGLVGNALGGLIKKI

SEQ ID NO: 1199 - protein, 20 aa, Bombina maxima
ILGPVISKIGGVLGGLLKNL

SEQ ID NO: 1200 - protein, 18 aa, Bombina maxima
GSNKGFNFMVDMIQALSN

SEQ ID NO: 1201 - protein, 18 aa, Bombina maxima
GSNKGFNFMVDMINALSN

SEQ ID NO: 1202 - protein, 18 aa, Bombina maxima
RSNKGFNFMVDMIQALSK

SEQ ID NO: 1203 - protein, 18 aa, Bombina maxima
GSNKGFNFMVDMIQALSK

SEQ ID NO: 1204 - protein, 25 aa, Bombina maxima
GIGGALLSAGKAALKGLAKGFAEHF

SEQ ID NO: 1205 - protein, 27 aa, Bombina maxima
GIGGALLSAGKSALKGLAKGLAEHFAS

SEQ ID NO: 1206 - protein, 27 aa, Bombina maxima
GIGTKIIGGLKTAVKGALKELASTYVN

SEQ ID NO: 1207 - protein, 27 aa, Bombina maxima
GIGGALLSAGKSALKGLAKGLAEHFAN

SEQ ID NO: 1208 - protein, 27 aa, Bombina maxima
GIGAKILGGVKTALKGALKELASTYVN

SEQ ID NO: 1209 - protein, 27 aa, Bombina maxima
GIGTKILGGLKTAVKGALKELASTYVN

SEQ ID NO: 1210 - protein, 27 aa, Bombina maxima
GIGRKFLGGVKTTFRCGVKDFASKHLY

SEQ ID NO: 1211 - protein, 20 aa, Bombina maxima
ILGPVLGLVSNALGGLLKNL

SEQ ID NO: 1212 - protein, 20 aa, Bombina maxima
ILGPVLGLVGSALGGLIKKI

SEQ ID NO: 1213 - protein, 20 aa, Bombina maxima
ILGPVIKTIGGVLGGLLKNL

SEQ ID NO: 1214 - protein, 20 aa, Bombina maxima
ILGPVLGLVGEPLGGLIKKI

SEQ ID NO: 1215 - protein, 20 aa, Bombina maxima
ILGPVLGLVGNALGGLLKNL

SEQ ID NO: 1216 - protein, 20 aa, Bombina maxima
ILGPVLSLVGNALGGLIKKI

SEQ ID NO: 1217 - protein, 20 aa, Bombina maxima
ILGPVLGLVSDTLDDVLGIL

SEQ ID NO: 1218 - protein, 20 aa, Bombina maxima
ILGPVIGTIGNVLGGLLKNL

SEQ ID NO: 1219 - protein, 20 aa, Bombina maxima
ILGPVIKTIGGVIGGLLKNL

SEQ ID NO: 1220 - protein, 20 aa, Bombina maxima
ILGPVLGLVSNALGGLLKNI

SEQ ID NO: 1221 - protein, 20 aa, Bombina maxima
ILGPVLGLVSNALGGLIKKI

SEQ ID NO: 1222 - protein, 20 aa, Bombina maxima
ILGPVLSLVGNALGGLLKNE

SEQ ID NO: 1223 - protein, 20 aa, Bombina maxima
ILGPVLSLVGSALGGLIKKI

SEQ ID NO: 1224 - protein, 20 aa, Bombina maxima
ILGPVLGLVSNAIGGLIKKI

SEQ ID NO: 1225 - protein, 25 aa, Bombina maxima
GIGGALLSAGKSALKGLAKGFAEHF

SEQ ID NO: 1226 - protein, 27 aa, Bombina maxima
GIGGALLSAGKSALKGLAKGLVEHFAN

SEQ ID NO: 1227 - protein, 27 aa, Bos taurus
GGLRSLGRKILRAWKKYGPQATPATRQ

SEQ ID NO: 1228 - protein, 119 aa, Cavia porcellus
TRGYVMVGSARTFNEAQWVCQRCYRGNLASIHSFAFNYQVQCTSAGLNVAQVWIGGQLRGKGRCRRFVWVDRTVWNFAYWARGQPWGGRQRGRCVTLCARGGHWRRSHCGKRRPFVCTY

SEQ ID NO: 1229 - protein, 62 aa, Escherichia coli
MNLNGLPASTNVIDLRGKDMGTYIDANGACWAPDTPSIIMYPGGSGPSYSMSSSTSSANSGS

SEQ ID NO: 1230 - protein, 45 aa, Musca domestica
GSPEFGWLKKIGKKIERVGQHTRDATIQTIGVAQQAANVAATLKG

SEQ ID NO: 1231 - protein, 63 aa, Megoura viciae
YLDVKQLANYLLCIGNGQVFNGRKTCQIGCRAVCQQPGCSGYKECEQIPNIRLHKYRCHCNEA

SEQ ID NO: 1232 - protein, 63 aa, Megoura viciae
YLDVNQIASYLLCLGQGAVFNGRKTCQIGCRAACQQPGCGGYKECEQIPNIRLHKYRCHCNSG

SEQ ID NO: 1233 - protein, 63 aa, Megoura viciae
YLDVNQIASYLLCLGEGAVFNGRKTCQIGCRAACQQPGCGGYKECEQIPNIRLHKYRCHCISG

SEQ ID NO: 1234 - protein, 18 aa, Melecta albifrons
GFLSILKKVLPKVMAHMK

SEQ ID NO: 1235 - protein, 15 aa, Palomena prasina
VDKPDYRPRPRPPNM

SEQ ID NO: 1236 - protein, 15 aa, Palomena prasina
VDKPDYRPRPWPRPN

SEQ ID NO: 1237 - protein, 16 aa, Palomena prasina
VDKPDYRPRPWPRNMI

SEQ ID NO: 1238 - protein, 16 aa, Palomena prasina
VDKPDYRPRPWPRPNM

SEQ ID NO: 1239 - protein, 26 aa, Drosophila melanogaster
HRHQGPIFDTRPSPFNPNQPRPGPIY

SEQ ID NO: 1240 - protein, 25 aa, Drosophila melanogaster
RRQGPIFDTRPSPFNPNQPRPGPIY

SEQ ID NO: 1241 - protein, 13 aa, Mesobuthus eupeus
IFGAIAGLLKNIF

SEQ ID NO: 1242 - protein, 18 aa, Mesobuthus eupeus
FFGHLFKLATKIIPSLFQ

SEQ ID NO: 1243 - protein, 7 aa, Escherichia coli
MRTGNAN

SEQ ID NO: 1244 - protein, 60 aa, Escherichia coli
  Escherichia coli MC4100
GGAPATSANAAGAAAIVGALAGIPGGPLGVVVGAVSAGLTTAIGSTVGSGSASSSAGGGS

SEQ ID NO: 1245 - protein, 60 aa, Escherichia coli; identical to SEQ ID NO: 1244
  Escherichia coli O6

SEQ ID NO: 1246 - protein, 90 aa, Escherichia coli
GDVNWVDVGKTVATNGAGVIGGAFGAGLCGPVCAGAFAVGSSAAVAALYDAAGNSNSAKQKPEGLPPEAWNYAEGRMCNWSPNNLSDVCL

SEQ ID NO: 1247 - protein, 77 aa, Escherichia coli
  Escherichia coli MC4100
DGNDGQAELIAIGSLAGTFISPGFGSIAGAYIGDKVHSWATTATVSPSMSPSGIGLSSQFGSGRGTSSASSSAGSGS

SEQ ID NO: 1248 - protein, 21 aa, Escherichia coli
GGAGHVPEYFVGIGTPISFYG

SEQ ID NO: 1249 - protein, 90 aa, Rhipicephalus microplus
HHQELCTKGDDALVTELECIRLRISPETNAAFDNAVQQLNCLNRACAYRKMCATNNLEQAMSVYFTNEQIKEIHDAATACDPEAHHEHDH

SEQ ID NO: 1250 - protein, 26 aa, Haemaphysalis longicornis
ACHAHCQSVGRRGGYCGNFRMTCYCY

SEQ ID NO: 1251 - protein, 21 aa, Misgurnus anguillicaudatus
RQRVEELSKFSKKGAAARRRK

SEQ ID NO: 1252 - protein, 9 aa, Artificial Sequence
  Description of Artificial Sequence: Synthetic Anti-viral polypeptide
ALRLAIRKR

SEQ ID NO: 1253 - protein, 9 aa, Artificial Sequence
  Description of Artificial Sequence: Synthetic Anti-viral polypeptide
ALLLAIRKR

SEQ ID NO: 1254 - protein, 9 aa, Artificial Sequence
  Description of Artificial Sequence: Synthetic Anti-viral polypeptide
AWLLAIRKR

SEQ ID NO: 1255 - protein, 9 aa, Artificial Sequence
  Description of Artificial Sequence: Synthetic Anti-viral polypeptide
ALYLAIRKR

SEQ ID NO: 1256 - protein, 9 aa, Artificial Sequence
  Description of Artificial Sequence: Synthetic Anti-viral polypeptide
ALWLAIRKR

SEQ ID NO: 1257 - protein, 42 aa, Bombyx mori
AKIPIKAIKTVGKAVGKGLRAINIASTANDVFNFLKPKKRKA

SEQ ID NO: 1258 - protein, 42 aa, Bombyx mori
AKIPIKAIKTVGKAVGKGLRAINIASTANDVFNFLKPKKRKH

SEQ ID NO: 1259 - protein, 39 aa, Galleria mellonella
KVNVNAIKKGGKAIGKGFKVISAASTAHDVYEHIKNRRH

SEQ ID NO: 1260 - protein, 43 aa, Galleria mellonella
GKIPVKAIKKGGQIIGKALRGINIASTAHDIISQFKPKKKKNH

SEQ ID NO: 1261 - protein, 38 aa, Galleria mellonella
KVPIGAIKKGGKIIKKGLGVIGAAGTAHEVYSHVKNRH

SEQ ID NO: 1262 - protein, 38 aa, Galleria mellonella
KVPIGAIKKGGKIIKKGLGVLGAAGTAHEVYNHVRNRQ

SEQ ID NO: 1263 - protein, 38 aa, Galleria mellonella
KVPIGAIKKGGKIIKKGLGVIGAAGTAHEVYSHVKNRQ

SEQ ID NO: 1264 - protein, 38 aa, Galleria mellonella
KVPVGAIKKGGKAIKTGLGVVGAAGTAHEVYSHIRNRH

SEQ ID NO: 1265 - protein, 38 aa, Galleria mellonella; identical to SEQ ID NO: 1264

SEQ ID NO: 1266 - protein, 38 aa, Galleria mellonella
KGIGSALKKGGKIIKGGLGALGAIGTGQQVYEHVQNRQ

SEQ ID NO: 1267 - protein, 23 aa, Morone saxatilis
FFHHIFRGIVHVGKTIHRLVTGG

SEQ ID NO: 1268 - protein, 22 aa, Siniperca chuatsi
IFHHIFKGIVHVGKTIHRLVTG

SEQ ID NO: 1269 - protein, 23 aa, Morone chrysops
FFHHIFRGIVHVGRTIHKLVTGG

SEQ ID NO: 1270 - protein, 23 aa, Morone saxatilis
FFHHIFRGIVHVGRTIHRLVTGG

SEQ ID NO: 1271 - protein, 22 aa, Morone chrysops x Morone saxatilis
FFHHIFRGIVHVGKTIHKLVTG

SEQ ID NO: 1272 - protein, 23 aa, Morone chrysops
FFHHIFRGIVHVGKTIHKLVTGG

SEQ ID NO: 1273 - protein, 22 aa, Morone chrysops x Morone saxatilis
FFHHIFRGIVHVGKTIHRLVTG

SEQ ID NO: 1274 - protein, 43 aa, Enterococcus mundtii
KYYGNGVSCNKKGCSVDWGKAIGIIGNNSAANLATGGAAGWSK

SEQ ID NO: 1275 - protein, 98 aa, Enterococcus mundtii
MSNLKWFSGGDDRRKKAEVIITELLDDLEMDLGNESLRKVLGSYLKKLKNEGTSVPLVLSRMNIEISNAIKKDGVSLNENQSKKLKELMSISNIRYGY

SEQ ID NO: 1276 - protein, 22 aa, Streptococcus mutans
FKSWSLCTPGCARTGSFNSYCC

SEQ ID NO: 1277 - protein, 18 aa, Bos taurus
GRFKRFRKKFKKLFKKLS

SEQ ID NO: 1278 - protein, 18 aa, Bos taurus
GGLRSLGRKILRAWKKYG

SEQ ID NO: 1279 - protein, 40 aa, Mytilus galloprovincialis
HSHACTSYWCGKFCGTASCTHYLCRVLHPGKMCACVHCSR

SEQ ID NO: 1280 - protein, 40 aa, Mytilus galloprovincialis
HPHVCTSYYCSKFCGTAGCTRYGCRNLHRGKLCFCLHCSR

SEQ ID NO: 1281 - protein, 34 aa, Mytilus edulis
GCASRCKAKCAGRRCKGWASASFRGRCYCKCFRC

SEQ ID NO: 1282 - protein, 177 aa, Achromobacter lyticus
AVDFGEAIWNPASSSNYSTASNQTSAVIMHTMEGSYAGSISWFQNPSAQVSAHYLIRKSDGQITQMVREYHQAWHAKNHNYYTIGIEHDGRAADAGNWSAAMVNASARLTKSICARRGVNCASAWKGPGYDTFHLVPDSVRVKGHGMLSGNENRYDPGKYFPWSNYYNLINGGGGNP

SEQ ID NO: 1283 - protein, 13 aa, Lysobacter sp.
  MOD_RES (1)..(1): Any amino acid
  MOD_RES (8)..(8): Any amino acid
  MOD_RES (10)..(10): Any amino acid
XNVVFLNXPXPQW

SEQ ID NO: 1284 - protein, 34 aa, Naegleria fowleri
DAECEICKFVIQQVEAFIESNHSQAEIQKELNKL

SEQ ID NO: 1285 - protein, 51 aa, Naja nigricollis
NEKSGSCPDMSMPIPPLGICKTLCNSDSGCPNVQKCCKNGCGFMTCTTPVP

SEQ ID NO: 1286 - protein, 113 aa, Streptomyces carzinostaticus
AAPTATVTPSSGLSDGTVVKVAGAGLQAGTAYDVGQCAWVDTGVLACNPADFSSVTADANGSASTSLTVRRSFEGFLFDGTRWGTVDCTTAACQVGLSDAAGNGPEGVAISFN

SEQ ID NO: 1287 - protein, 32 aa, Rattus norvegicus
VTCYCRSTRCGFRERLSGACGYRGRIYRLCCR

SEQ ID NO: 1288 - protein, 41 aa, Bos taurus
QRVRNPQSCRWNMGVCIPFLCRVGMRQIGTCFGPRVPCCRR

SEQ ID NO: 1289 - protein, 28 aa, Bos taurus
NPQSCRWNMGVCIPISCPGNMRQIGTCS

SEQ ID NO: 1290 - protein, 43 aa, Cavia porcellus
GLRKKFRKTRKRIQKLGRKIGKTGRKVWKAWREYGQIPYPCRI

SEQ ID NO: 1291 - protein, 33 aa, Mesocricetus auratus
VTCFCRRRGCASRERHIGYCRFGNTIYRLCCRR

SEQ ID NO: 1292 - protein, 30 aa, Macaca mulatta
ACYCRIPACLAGERRYGTCFYLGRVWAFCC

SEQ ID NO: 1293 - protein, 31 aa, Mesocricetus auratus
CFCKRPVCDSGETQIGYCRLGNTFYRLCCRQ

SEQ ID NO: 1294 - protein, 30 aa, Macaca mulatta
ACYCRIPACLAGERRYGTCFYMGRVWAFCC

SEQ ID NO: 1295 - protein, 33 aa, Mesocricetus auratus
VTCFCRRRGCASRERLIGYCRFGNTIYGLCCRR

SEQ ID NO: 1296 - protein, 30 aa, Macaca mulatta
ACYCRIPACLAGERRYGTCFYRRRVWAFCC

SEQ ID NO: 1297 - protein, 33 aa, Macaca mulatta
RRTCRCRFGRCFRRESYSGSCNINGRIFSLCCR

SEQ ID NO: 1298 - protein, 33 aa, Mesocricetus auratus
VTCFCKRPVCDSGETQIGYCRLGNTFYRLCCRQ

SEQ ID NO: 1299 - protein, 33 aa, Homo sapiens
VCSCRLVFCRRTELRVGNCLIGGVSFTYCCTRV

SEQ ID NO: 1300 - protein, 33 aa, Macaca mulatta
RRTCRCRFGRCFRRESYSGSCNINGRISSLCCR

SEQ ID NO: 1301 - protein, 30 aa, Macaca mulatta
ACYCRIPACLAGERRYGTCFYLRRVWAFCC

SEQ ID NO: 1302 - protein, 26 aa, Hylarana guentheri
VIDDLKKVAKKVRRELLCKKHHKKLN

SEQ ID NO: 1303 - protein, 33 aa, Pelophylax nigromaculatus
GLLDSIKGMAISAGKGALQNLLKVASCKLDKTC

SEQ ID NO: 1304 - protein, 21 aa, Pelophylax nigromaculatus
GLLSKVLGVGKKVLCGVSGLC

SEQ ID NO: 1305 - protein, 21 aa, Odorrana grahami
GLFGKILGVGKKVLCGLSGMC

SEQ ID NO: 1306 - protein, 21 aa, Odorrana grahami
GLLSGILGAGKHIVCGLSGLC

SEQ ID NO: 1307 - protein, 21 aa, Odorrana hosii
GLLGSLFGAGKKVACALSGLC

SEQ ID NO: 1308 - protein, 21 aa, Odorrana hosii
GLLGSIFGAGKKIACALSGLC

SEQ ID NO: 1309 - protein, 21 aa, Odorrana grahami
GLLSGILGAGKHIICGLSGLC

SEQ ID NO: 1310 - protein, 21 aa, Odorrana grahami
GLLSGILGAGKQKVCGLSGLC

SEQ ID NO: 1311 - protein, 21 aa, Odorrana grahami
GLLSGILGAGKHIVCGLSGLR

SEQ ID NO: 1312 - protein, 21 aa, Odorrana grahami
GLLSGILGAGKNIVCGLSGLC

SEQ ID NO: 1313 - protein, 21 aa, Odorrana grahami
GLLSGVLGVGKKVLCGLSGLC

SEQ ID NO: 1314 - protein, 34 aa, Lactococcus lactis
ITSISLCTPGCKTGVLMGCNLKTATCNCSVHVSK

SEQ ID NO: 1315 - protein, 10 aa, Hadrurus gertschi
FIFDLLKKLV

SEQ ID NO: 1316 - protein, 13 aa, Hadrurus gertschi
IFSAIAGLLSNLL

SEQ ID NO: 1317 - protein, 21 aa, Vigna radiata
  Vigna radiata var radiata
MTCGQVQGNLAQCIGFLQKGG

SEQ ID NO: 1318 - protein, 92 aa, Lens culinaris
AISCGAVTSDLSPCLTYLTGGPGPSPQCCGGVKKLLAAANTTPDRQAACNCLKSAAGSITKLNTNNAAALPGKCGVNIPYKISTTTNCNTVK

SEQ ID NO: 1319 - protein, 92 aa, Lens culinaris
AISCGAVTSDLSPCLTYLTGGPGPSPQCCGGVKKLLAAANTTPDRQAACNCLKSAAGSITKLNTNNAAALPGKCGVNIPYKISTSTNCNTVK

SEQ ID NO: 1320 - protein, 90 aa, Hordeum vulgare
AISCGQVSSALSPCISYARGNGAKPPAACCSGVKRLAGAAQSTADKQAACKCIKSAAGGLNAGKAAGIPSMCGVSVPYAISASVDCSKIR

SEQ ID NO: 1321 - protein, 92 aa, Lens culinaris
AISCGAVTGDLSPCLTYLTGGPGPSPQCCGGVKKLLAAANTTPDRQAACNCMKSAASSITKLNTNNAAALPGKCGVNIPYKISTSTNCNTVK

SEQ ID NO: 1322 - protein, 93 aa, Lens culinaris
AISCGAVTSDLSPCLTYLTGGPGPSPQCCGGVKKLLAAANTTPDRQAACNCLKSAAGSITKLNTNNAAALPGKCGVDIPYKISTSTNCNTVKF

SEQ ID NO: 1323 - protein, 90 aa, Hordeum vulgare
AITCGQVSSALGPCAAYAKGSGTSPSAGCCSGVKRLAGLARSTADKQATCRCLKSVAGAYNAGRAAGIPSRCGVSVPYTISASVDCSKIH

SEQ ID NO: 1324 - protein, 25 aa, Leptodactylus ocellatus
GVVDILKGAGKDLLAHLVGKISEKV

SEQ ID NO: 1325 - protein, 22 aa, Leptodactylus ocellatus
GVLDIFKDAAKQILAHAAEKQI

SEQ ID NO: 1326 - protein, 21 aa, Leptodactylus ocellatus
GVLDILKNAAKNILAHAAEQI

SEQ ID NO: 1327 - protein, 21 aa, Leptodactylus ocellatus
GLLDFVTGVGKDIFAQLIKQI

SEQ ID NO: 1328 - protein, 17 aa, Leptodactylus ocellatus
GLLDFLKAAGKGLVTNL

SEQ ID NO: 1329 - protein, 33 aa, Odorrana grahami
GVLGTVKNLLIGAGKSAAQSVLKTLSCKLSNDC

SEQ ID NO: 1330 - protein, 33 aa, Odorrana grahami
GFLDTFKNLALNAAKSAGVSVLNSLSCKLFKTC

SEQ ID NO: 1331 - protein, 32 aa, Odorrana grahami
GLGGAKKNFIIAANKTAPQSVKKTFSCKLYNG

SEQ ID NO: 1332 - protein, 13 aa, Odorrana grahami
FMPILSCSRFKRC

SEQ ID NO: 1333 - protein, 28 aa, Odorrana grahami
ATAWDFGPHGLLPIRPIRIRPLCGKDKS

SEQ ID NO: 1334 - protein, 20 aa, Odorrana grahami
AALKGCWTKSIPPKPCFGKR

SEQ ID NO: 1335 - protein, 29 aa, Odorrana grahami
GFMDTAKNAAKNVAVTLLDNLKCKITKAC

SEQ ID NO: 1336 - protein, 21 aa, Odorrana grahami
GIFGKILGVGKKVLCGLSGVC

SEQ ID NO: 1337 - protein, 20 aa, Odorrana grahami
GLFTLIKCAYQLIAPTVACN

SEQ ID NO: 1338 - protein, 39 aa, Odorrana grahami
GLFTLIKGAAKLIGKTVPKKQARLGMNLWLVKLPTNVKT

SEQ ID NO: 1339 - protein, 24 aa, Odorrana grahami
VIPFVASVAAEMMQHVYCAASKKC

SEQ ID NO: 1340 - protein, 38 aa, Odorrana grahami
GLLSGILGAGKHIVCGLSGPCQSLNRKSSDVEYHLAKC

SEQ ID NO: 1341 - protein, 14 aa, Odorrana grahami
GFSPNLPGKGLRIS

SEQ ID NO: 1342 - protein, 14 aa, Odorrana grahami
FLPPSPWKETFRTS

SEQ ID NO: 1343 - protein, 14 aa, Odorrana grahami
TSRCYIGYRRKWCS

SEQ ID NO: 1344 - protein, 16 aa, Odorrana grahami
GCSRWIIGIHGQICRD

SEQ ID NO: 1345 - protein, 12 aa, Odorrana grahami
GLLSGTSVRGST

SEQ ID NO: 1346 - protein, 23 aa, Odorrana grahami
GLFGKSSVHGRKYYVDLAGCAKA

SEQ ID NO: 1347 - protein, 34 aa, Ophiophagus hannah
KRFKKFFKKLKNSVKKRAKKFFKKPRVIGVSIPF

SEQ ID NO: 1348 - protein, 50 aa, Oxyuranus microlepidotus
KDRPKKPGLCPPRPQKPCVKECKNDDSCPGQQKCCNYGCKDECRDPIFVG

SEQ ID NO: 1349 - protein, 69 aa, Oncorhynchus mykiss
KAVAAKKSPKKAKKPATPKKAAKSPKKVKKPAAAAKKAAKSPKKATKAAKPKAAKPKAAKAKKAAPKKK

SEQ ID NO: 1350 - protein, 66 aa, Oncorhynchus mykiss
PKRKSATKGDEPARRSARLSARPVPKPAAKPKKAAAPKKAVKGKKAAENGDAKAEAKVQAAGDGAG

SEQ ID NO: 1351 - protein, 15 aa, Oncorhynchus mykiss
SKGKKANKDVELARG

SEQ ID NO: 1352 - protein, 76 aa, Opistophthalmus carinatus
KWFNEKSIQNKIDEKIGKNFLGGMAKAVVHKLAKNEFMCVANVDMTKSCDTHCQKASGEKGYCHGTKCKCGVPLSY

SEQ ID NO: 1353 - protein, 76 aa, Opistophthalmus carinatus
KWLNEKSIQNKIDEKIGKNFLGGMAKAVVHKLAKNEFMCMANMDPTGSCETHCQKASGEKGYCHGTKCKCGVPLSY

SEQ ID NO: 1354 - protein, 76 aa, Opistophthalmus carinatus
KWLNEKSIQNKIDEKIGKNFLGGMAKAVVHKLAKNEFMCVANVDMTKSCDTHCQKASGEKGYCHGTKCKCGVPLSY

SEQ ID NO: 1355 - protein, 76 aa, Opistophthalmus carinatus
KWLNEKSIQNKIDEKIGKNFLGGMAKAVVHKLAKNEFMCVANIDMTKSCDTHCQKASGEKGYCHGTKCKCGVPLSY

SEQ ID NO: 1356 - protein, 44 aa, Opistophthalmus carinatus
GKVWDWIKSTAKKLWNSEPVKELKNTALNAAKNLVAEKIGATPS

SEQ ID NO: 1357 - protein, 44 aa, Opistophthalmus carinatus
GKVWDWIKSTAKKLWNSEPVKELKNTALNAAKNFVAEKIGATPS

SEQ ID NO: 1358 - protein, 44 aa, Opistophthalmus carinatus
GKVWDWIKKTAKDVLNSDVAKQLKNKALNAAKNFVAEKIGATPS

SEQ ID NO: 1359 - protein, 32 aa, Macaca mulatta
RRTCHCRSRCLRRESNSGSCNINGRIFSLCCR

SEQ ID NO: 1360 - protein, 36 aa, Struthio camelus
LFCRKGTCHFGGCPAHLVKVGSCFGFRACCKWPWDV

SEQ ID NO: 1361 - protein, 41 aa, Struthio camelus
APGNKAECEREKGYCGFLKCSFPFVVSGKCSRFFFCCKNIW

SEQ ID NO: 1362 - protein, 40 aa, Struthio camelus
IPRPLDPCIAQNGRCFTGICRYPYFWIGTCRNGKSCCRRR

SEQ ID NO: 1363 - protein, 42 aa, Struthio camelus
LPVNEAQCRQVGGYCGLRICNFPSRFLGLCTRNHPCCSRVWV

SEQ ID NO: 1364 - protein, 48 aa, Oxyopes sp.
  Oxyopes kitabensis
FRGLAKLLKIGLKSFARVLKKVLPKAAKAGKALAKSMADENAIRQQNQ

SEQ ID NO: 1365 - protein, 37 aa, Oxyopes sp.
  Oxyopes kitabensis
GKFSVFGKILRSIAKVFKGVGKVRKQFKTASDLDKNQ

SEQ ID NO: 1366 - protein, 37 aa, Oxyopes sp.
  Oxyopes kitabensis
GKFSGFAKILKSIAKFFKGVGKVRKQFKEASDLDKNQ

SEQ ID NO: 1367 - protein, 37 aa, Oxyopes sp.
  Oxyopes kitabensis
GKLSGISKVLRAIAKFFKGVGKARKQFKEASDLDKNQ

SEQ ID NO: 1368 - protein, 37 aa, Oxyopes sp.
  Oxyopes kitabensis
GKFSVFSKILRSIAKVFKGVGKVRKQFKTASDLDKNQ

SEQ ID NO: 1369 - protein, 18 aa, Artificial Sequence
  Description of Artificial Sequence: Synthetic Anti-viral polypeptide
KWKLFKKIPKFLHLAKKF

SEQ ID NO: 1370 - protein, 28 aa, Rana palustris
ALFSILRGLKKLGKMGQAFVNCEIYKKC

SEQ ID NO: 1371 - protein, 28 aa, Rana palustris
ALFSILRGLKKLGNMGQAFVNCKIYKKC

SEQ ID NO: 1372 - protein, 27 aa, Rana palustris
ALSILRGLEKLAKMGIALTNCKATKKC

SEQ ID NO: 1373 - protein, 27 aa, Rana palustris
ALSILKGLEKLAKMGIALTNCKATKKC

SEQ ID NO: 1374 - protein, 31 aa, Rana palustris
GFLSTVKNLATNVAGTVLDTIRCKVTGGCRP

SEQ ID NO: 1375 - protein, 31 aa, Rana palustris
GFFSTVKNLATNVAGTVIDTLKCKVTGGCRS

SEQ ID NO: 1376 - protein, 31 aa, Rana palustris
GFLSTVKNLATNVAGTVIDTLKCKVTGGCRS

SEQ ID NO: 1377 - protein, 48 aa, Rana palustris
GIFPKIIGKGIKTGIVNGIKSLVKGVGMKVFKAGLNNIGNTGCNEDEC

SEQ ID NO: 1378 - protein, 48 aa, Rana palustris
GIFPKIIGKGIKTGIVNGIKSLVKGVGMKVFKAGLSNIGNTGCNEDEC

SEQ ID NO: 1379 - protein, 44 aa, Pandinus imperator
GKVWDWIKSAAKKIWSSEPVSQLKGQVLNAAKNYVAEKIGATPT

SEQ ID NO: 1380 - protein, 24 aa, Pandinus imperator
FWGALAKGALKLIPSLFSSFSKKD

SEQ ID NO: 1381 - protein, 75 aa, Pandinus imperator
GWINEEKIQKKIDERMGNTVLGGMAKAIVHKMAKNEFQCMANMDMLGNCEKHCQTSGEKGYCHGTKCKCGTPLSY

SEQ ID NO: 1382 - protein, 45 aa, Parabuthus schlechteri
FKLGSFLKKAWKSKLAKKLRAKGKEMLKDYAKGLLEGGSEEVPGQ

SEQ ID NO: 1383 - protein, 19 aa, Silurus asotus
KGRGKQGGKVRAKAKTRSS

SEQ ID NO: 1384 - protein, 19 aa, Phyllomedusa bicolor
FLSLIPHIVSGVAALAKHL

SEQ ID NO: 1385 - protein, 35 aa, Artificial Sequence
  Description of Artificial Sequence: Synthetic Anti-viral polypeptide
YYGNGVTCGKHSCSVDWGKATTCIINNGAMAWATG

SEQ ID NO: 1386 - protein, 42 aa, Pelodiscus sinensis
DDTPSSRCGSGGWGPCLPIVDLLCIVHVTVGCSGGFGCCRIG

SEQ ID NO: 1387 - protein, 47 aa, Litopenaeus setiferus
HSSGYTRPLRKPSRPIFIRPIGCDVCYGIPSSTARLCCFRYGDCCHL

SEQ ID NO: 1388 - protein, 60 aa, Fenneropenaeus chinensis
QGYKSGHTGPYPRPLYGSRPIGLRPITRPDPSCAGCRILTLDDAIACCRRLGRCCSALKG

SEQ ID NO: 1389 - protein, 31 aa, Litopenaeus vannamei
YRGGYTGPIPRPPPIGRPPLRLVVCACYRLS

SEQ ID NO: 1390 - protein, 50 aa, Litopenaeus vannamei
YRGGYTGPIPRPPPIGRPPFRPVCNACYRLSVSDARNCCIKFGSCCHLVK

SEQ ID NO: 1391 - protein, 50 aa, Litopenaeus vannamei
YRGGYTGPIPRPPPIGRPPLRPVCNACYRLSVSDARNCCIKFGSCCHLVK

SEQ ID NO: 1392 - protein, 50 aa, Litopenaeus setiferus
QRGGFTGPIPRPPPHGRPPLGPICNACYRLSFSDVRICCNFLGKCCHLVK

SEQ ID NO: 1393 - protein, 62 aa, Litopenaeus vannamei
QVYKGGYTRPIPRPPPFVRPLPGGPIGPYNGCPVSCRGISFSQARSCCSRLGRCCHVGKGYS

SEQ ID NO: 1394 - protein, 62 aa, Litopenaeus vannamei
QVYKGGYTRPVPRPPPFVRPLPGGPIGPYNGCPVSCRGISFSQARSCCSRLGRCCHVGKGYS

SEQ ID NO: 1395 - protein, 61 aa, Litopenaeus vannamei
QVYKGGYTRPIPRPPFVRPVPGGPIGPYNGCPVSCRGISFSQARSCCSRLGRCCHVGKGYS

SEQ ID NO: 1396 - protein, 62 aa, Litopenaeus vannamei
QVYKGGYTRPIPRPPPFVRPLPGGPIGPYNGCPISCRGISFSQARSCCSRLGRCCHVGKGYS

SEQ ID NO: 1397 - protein, 62 aa, Litopenaeus vannamei
QVYKGGYTRPIPRPPPFVRPLPGGPISPYNGCPVSCRGISFSQARSCCSRLGRCCHVGKGYS

SEQ ID NO: 1398 - protein, 62 aa, Litopenaeus vannamei
QVYKGGYTRPIPRPPPFVRPLPGGPIGPYNGCPISCRGISFSQARSYCSRLGRCCHVGKGYS

SEQ ID NO: 1399 - protein, 62 aa, Litopenaeus vannamei
QVYKGGYTRPIPRPPPFVRPLPGGPIGPYNGRPVSCRGISFSQARSCCSRLGRCCHVGKGYS

SEQ ID NO: 1400 - protein, 61 aa, Litopenaeus vannamei
QVYKGGYTRPVPRPPFVRPLPGGPIGPYNGCPVSCRGISFSQARSCCSRLGRCCHVGKGYS

SEQ ID NO: 1401 - protein, 55 aa, Litopenaeus setiferus
QGYKGPYTRPILRPYVRPVVSYNACTLSCRGITTTQARSCCTRLGRCCHVAKGYS

SEQ ID NO: 1402 - protein, 55 aa, Litopenaeus setiferus
QGYKGPYTRPILRPYVRPVVSYNVCTLSCRGITTTQARSCCTRLGRCCHVAKGYS

SEQ ID NO: 1403 - protein, 55 aa, Litopenaeus setiferus
QGCKGPYTRPILRPYVRPVVSYNACTLSCRGITTTQARSCCTRLGRCCHVAKGYS

SEQ ID NO: 1404 - protein, 55 aa, Litopenaeus setiferus
QGYKGPYTRPILRPYVRPVVSYNACTLSCRGITTTQARSCSTRLGRCCHVAKGYS

SEQ ID NO: 1405 - protein, 47 aa, Litopenaeus vannamei
HSSGYTRPLPKPSRPIFIRPIGCDVCYGIPSSTARLCCFRYGDCCHR

SEQ ID NO: 1406 - protein, 47 aa, Litopenaeus vannamei
YSSGYTRPLPKPSRPIFIRPIGCDVCYGIPSSTARLCCFRYGDCCHR

SEQ ID NO: 1407 - protein, 42 aa, Pediococcus pentosaceus
  Pediococcus pentosaceus ATCC 25745
KYYGNGVHCGKKTCYVDWGQATASIGKIIVNGWTQHGPWAHR

SEQ ID NO: 1408 - protein, 18 aa, Rana pipiens
LVRGCWTKSYPPKPCFVR

SEQ ID NO: 1409 - protein, 19 aa, Lycosa singoriensis
AGIGKIGDFIKKAIAKYKN

SEQ ID NO: 1410 - protein, 21 aa, Lycosa singoriensis
MIASHLAFEKLSKLGSKHTML

SEQ ID NO: 1411 - protein, 51 aa, Perinereis aibuhitensis
FNKLKQGSSKRTCAKCFRKIMPSVHELDERRRGANRWAAGFRKCVSSICRY

SEQ ID NO: 1412 - protein, 22 aa, Artificial Sequence
  Description of Artificial Sequence: Synthetic Anti-viral polypeptide
GIGKFLKKAKKFGKAFVKILKK

SEQ ID NO: 1413 - protein, 55 aa, Psidium guajava
RESPSSRMECYEQAERYGYGGYGGGRYGGGYGSGRGQPVGQGVERSHDDNRNQPR

SEQ ID NO: 1414 - protein, 40 aa, Protophormia terraenovae
ATCDLLSGTGINHSACAAHCLLRGNRGGYCNRKGVCVCRN

SEQ ID NO: 1415 - protein, 20 aa, Protophormia terraenovae
ACAAHCLLRGNRGGYCNGKG

SEQ ID NO: 1416 - protein, 121 aa, Bothrops jararacussu
SLFELGKMILQETGKNPAKSYGAYGCNCGVLGRGKPKDATDRCCYVHKCCYKKLTGCDPKKDRYSYSWKDKTIVCGENNPCLKELCECDKAVAICLRENLGTYNKKYRYHLKPFCKKADPC

SEQ ID NO: 1417 - protein, 122 aa, Bothrops atrox
SLVELGKMILQETGKNPLTSYGAYGCNCGVGGRGKPKDATDRCCYVHKCCYKKMTDCDPKKDRYSYSWKDKTIVCGEKNSCLKELCECDKAVAICLRENLDTYNKKYKNNYLKPFCKKADAC

SEQ ID NO: 1418 - protein, 122 aa, Crotalus durissus
  Crotalus durissus ruruima
HLLQFNKMIKFETRKNAIPFYAFYGCYCGWGGRGRPKDATDRCCFVHDCCYGKLAKCNTKWDIYPYSLKSGYITCGKGTWCEEQICECDRVAAECLRRSLSTYKYGYMFYPDSRCRGPSETC

SEQ ID NO: 1419 - protein, 20 aa, Phyllomedusa azurea
FLSLLPSIVSGAVSLAKKLG

SEQ ID NO: 1420 - protein, 19 aa, Phyllomedusa hypochondrialis
FLSLIPHAINAVSAIAKHN

SEQ ID NO: 1421 - protein, 20 aa, Phyllomedusa hypochondrialis
FLSLIPHAINAVSTLVHHSG

SEQ ID NO: 1422 - protein, 20 aa, Phyllomedusa oreades
FLSLIPHAINAVSTLVHHSG

SEQ ID NO: 1423 - protein, 19 aa, Phyllomedusa hypochondrialis
FLSLIPHAINAVSAIAKHS

SEQ ID NO: 1424 - protein, 19 aa, Phyllomedusa oreades
FLSLIPHAINAVSAIAKHS

SEQ ID NO: 1425 - protein, 20 aa, Phyllomedusa hypochondrialis
FLSLIPHAINAVSAIAKHFG

SEQ ID NO: 1426 - protein, 19 aa, Phyllomedusa bicolor
GWMSKIASGIGTFLSGMQQ

SEQ ID NO: 1427 - protein, 24 aa, Myrmecia banksi
IIGLVSKGTCVLVKTVCKKVLKQG

SEQ ID NO: 1428 - protein, 36 aa, Myrmecia banksi
FDITKLNIKKLTKATCKVISKGASMCKVLFDKKKQE

SEQ ID NO: 1429 - protein, 20 aa, Myrmecia pilosula
GLGSVFGRLARILGRVIPKV

SEQ ID NO: 1430 - protein, 20 aa, Myrmecia pilosula
GLLSKFGRLARKLARVIPKV

SEQ ID NO: 1431 - protein, 53 aa, Carnobacterium maltaromaticum
DQMSDGVNYGKGSSLSKGGAKCGLGIVGGLATIPSGPLGWLAGAAGVINSCMK

SEQ ID NO: 1432 - protein, 22 aa, Morone chrysops x Morone saxatilis
FIHHIFRGIVHAGRSIGRFLTG

SEQ ID NO: 1433 - protein, 43 aa, Lactobacillus plantarum
  Lactobacillus plantarum 423
KNYGNGVHCTKKGCSVDWGYAWANIANNSVMNGLTGGNAGWHN

SEQ ID NO: 1434 - protein, 26 aa, Lactobacillus plantarum
KSSAYSLQMGATAIKQVKKLFKKWGW

SEQ ID NO: 1435 - protein, 66 aa, Homo sapiens
AELRCMCIKTTSGIHPKNIQSLEVIGKGTHCNQVEVIATLKDGRKICLDPDAPRIKKIVQKKLAGD

SEQ ID NO: 1436 - protein, 40 aa, Pseudoplectania nigrella
GFGCNGPWDEDDMQCHNHCKSIKGYKGGYCAKGGFVCKCY

SEQ ID NO: 1437 - protein, 26 aa, Babina pleuraden
SIITMTKEAKLPQLWKQIACRLYNTC

SEQ ID NO: 1438 - protein, 26 aa, Babina pleuraden
SIITMTKEAKLPQSWKQIACRLYNTC

SEQ ID NO: 1439 - protein, 26 aa, Babina pleuraden
SIITMTREAKLPQLWKQIACRLYNTC

SEQ ID NO: 1440 - protein, 26 aa, Babina pleuraden
SIITTTKEAKLPQLWKQIACRLYNTC

SEQ ID NO: 1441 - protein, 25 aa, Pseudopleuronectes americanus
GWGSFFKKAAHVGKHVGKAALTHYL

SEQ ID NO: 1442 - protein, 26 aa, Hippoglossoides platessoides
GWKSVFRKAKKVGKTVGGLALDHYLG

SEQ ID NO: 1443 - protein, 26 aa, Hippoglossoides platessoides
GWKKWFNRAKKVGKTVGGLAVDHYLG

SEQ ID NO: 1444 - protein, 23 aa, Hippoglossoides platessoides
GWRTLLKKAEVKTVGKLALKHYL

SEQ ID NO: 1445 - protein, 18 aa, Glyptocephalus cynoglossus
GWKKWFTKGERLSQRHFA

SEQ ID NO: 1446 - protein, 21 aa, Glyptocephalus cynoglossus
FWGKLLKLGMHGIGLLHQHLG

SEQ ID NO: 1447 - protein, 26 aa, Glyptocephalus cynoglossus
GWGSIFKHIFKAGKFIHGAIQAHNDG

SEQ ID NO: 1448 - protein, 26 aa, Hippoglossus hippoglossus
GFLGILFHGVHHGRKKALQMNSERRS

SEQ ID NO: 1449 - protein, 24 aa, Hippoglossus hippoglossus
FLGLLFHGVHHVGKWIHGLIHGHH

SEQ ID NO: 1450 - protein, 25 aa, Limanda ferruginea
RWGKWFKKATHVGKHVGKAALTAYL

SEQ ID NO: 1451 - protein, 17 aa, Lactobacillus plantarum
GATAIKQVKKLFKKWGW

SEQ ID NO: 1452 - protein, 22 aa, Lactobacillus plantarum
YSLQMGATAIKQVKKLFKKWGW

SEQ ID NO: 1453 - protein, 37 aa, Unknown; identical to SEQ ID NO: 184
  Description of Unknown: Cercopithecidae polypeptide

SEQ ID NO: 1454 - protein, 12 aa, Polybia paulista
ILGTILGLLKSL

SEQ ID NO: 1455 - protein, 18 aa, Limulus polyphemus
RRWCFRVCYRGFCYRKCR

SEQ ID NO: 1456 - protein, 18 aa, Limulus polyphemus
RRWCFRVCYKGFCYRKCR

SEQ ID NO: 1457 - protein, 30 aa, Pachycondyla goeldii
GWKDWAKKAGGWLKKKGPGMAKAALKAAMQ

SEQ ID NO: 1458 - protein, 30 aa, Pachycondyla goeldii
GWKDWLKKGKEWLKAKGPGIVKAALQAATQ

SEQ ID NO: 1459 - protein, 30 aa, Pachycondyla goeldii
GWKDWLNKGKEWLKKKGPGIMKAALKAATQ

SEQ ID NO: 1460 - protein, 29 aa, Pachycondyla goeldii
DFKDWMKTAGEWLKKKGPGILKAAMAAAT

SEQ ID NO: 1461 - protein, 30 aa, Pachycondyla goeldii
GLKDWVKIAGGWLKKKGPGILKAAMAAATQ

SEQ ID NO: 1462 - protein, 18 aa, Pachycondyla goeldii
GLVDVLGKVGGLIKKLLP

SEQ ID NO: 1463 - protein, 19 aa, Pachycondyla goeldii
GLVDVLGKVGGLIKKLLPG

SEQ ID NO: 1464 - protein, 24 aa, Pachycondyla goeldii
LLKELWTKMKGAGKAVLGKIKGLL

SEQ ID NO: 1465 - protein, 24 aa, Pachycondyla goeldii
LLKELWTKIKGAGKAVLGKIKGLL

SEQ ID NO: 1466 - protein, 25 aa, Pachycondyla goeldii
WLGSALKIGAKLLPSVVGLFKKKKQ

SEQ ID NO: 1467 - protein, 25 aa, Pachycondyla goeldii
WLGSALKIGAKLLPSVVGLFQKKKK

SEQ ID NO: 1468 - protein, 26 aa, Pachycondyla goeldii
GIWGTLAKIGIKAVPRVISMLKKKKQ

SEQ ID NO: 1469 - protein, 26 aa, Pachycondyla goeldii
GIWGTALKWGVKLLPKLVGMAQTKKQ

SEQ ID NO: 1470 - protein, 24 aa, Pachycondyla goeldii
FWGALIKGAAKLIPSVVGLFKKKQ

SEQ ID NO: 1471 - protein, 20 aa, Pachycondyla goeldii
FIGTALGIASAIPAIVKLFK

SEQ ID NO: 1472 - protein, 77 aa, Entamoeba histolytica
GEILCNLCTGLINTLENLLTTKGADKVKDYISSLCNKASGFIATLCTKVLDFGIDKLIQLIEDKVDANAICAKIHAC

SEQ ID NO: 1473 - protein, 77 aa, Entamoeba histolytica
GAILCNLCKDTVKLVENLLTVDGAQAVRQYIDNLCGKASGFLGTLCEKILSFGVDELVKLIENHVDPVVVCEKIHAC

SEQ ID NO: 1474 - protein, 77 aa, Entamoeba histolytica
IPVLCPVCTSLVGKLIDLVLGGAVDKVTDYLETLCAKADGLVETLCTKIVSYGIDKLIEKILEGGSAKLICGLIHAC

SEQ ID NO: 1475 - protein, 23 aa, Rana sakuraii
VIGSILGALASGLPTLISWIKNR

SEQ ID NO: 1476 - protein, 23 aa, Rana tagoi
AIGSILGALAKGLPTLISWIKNR

SEQ ID NO: 1477 - protein, 19 aa, Rana sakuraii
FLPVILPVIGKLLNGILGK

SEQ ID NO: 1478 - protein, 131 aa, Riptortus clavatus
GYVSGAVIEIPDEILDSARFISLYSDGLRQKRQLNLSGPGSEHAGTIRLDGQRNIFDNGRTRVDGTGSYQLDYARGMKPIHGAGLGAEVNHNIWRGRGGQSLDLYGGATRQFNFGNRPNEWGAHGGIRYNF

SEQ ID NO: 1479 - protein, 380 aa, Lactococcus lactis
  subsp. cremoris
ATNSSEAFIESIAASAKPVADANGLYPSVMIAQAILESNWGSSQLSRAPYYNLFGIQGTYQGKSVVFKTQEYLNGKWVTKDMPFRVYPSFNQSFQDNTYVLKTTNFGNGPYYAKAWRANAATYQDATAALTGKYATDPSYGASLNRIISQYNLTRFDGASSAGNTNSGGSTTTNTNNNSGTNSSSTTYTVKSGDTLWGISQRYGISVAQIQSANNLKSTIIYIGQKLLLTGSASSTNSGGSNNSASTTPTTSVTPAKPASQTSVKVKSGDTLWALSVKYKTSIAQLKSWNHLSSDTIYIGQNLIVSQSAATSNPSTGSGSTATNNSNSTSSNSNASIHKVVKGDTLWGLSQKSGSPIASIKAWNHLSSDTILIGQYLRIK

SEQ ID NO: 1480 - protein, 380 aa, Lactococcus lactis
  subsp. cremoris
ATNSSEVFIESIAASAKPVADANGLYPSVMIAQAILESNWGSSQLSRAPYYNLFGIQGTYQGKSVVFKTQEYLNGKWVTKDMPFRVYPSFNQSFQDNAYVLKTTNFGNGPYYAKAWRANAATYQDATAALTGRYATDPSYGASLNRIISQYNLTRFDGASSAGNTNSGGSTTTITNNNSGTNSSSTTYTVKSGDTLWGISQRYGISVAQIQSANNLKSTIIYIGQKLVLTGSASSTNSGGSNNSASTTPTTSVTPAKPTSQTTVKVKSGDTLWALSVKYKTSIAQLKSWNHLSSDTIYIGQNLIVSQSAAASNPSTGSGSTATNNSNSTSSNSNASIHKVVKGDTLWGLSQKSGSPIASIKAWNHLSSDTILIGQYLRIK

SEQ ID NO: 1481 - protein, 29 aa, Bos taurus
FAEPTBSEEEGESYSKEVPEMEKRYGGFM

SEQ ID NO: 1482 - protein, 37 aa, Galleria mellonella
DIQIPGIKKPTHRDIIIPNWNPNVRTQPWQRFGGNKS

SEQ ID NO: 1483 - protein, 42 aa, Galleria mellonella
EIRLPEPFRFPSPTVPKPIDIDPILPHPWSPRQTYPIIARRS

SEQ ID NO: 1484 - protein, 79 aa, Sus scrofa
AFPPPNVPGPRFPPPNFPGPRFPPPNFPGPRFPPPNFPGPRFPPPNFPGPPFPPPIFPGPWFPPPPPFRPPPFGPPRFP

SEQ ID NO: 1485 - protein, 43 aa, Propionibacterium freudenreichii
  subsp. freudenreichii
WFYQGMNIAIYANIGGVANIIGYTEAAVATLLGAVVAVAPVVP

SEQ ID NO: 1486 - protein, 64 aa, Propionibacterium jensenii
RARAPHKAWYNCMTDAGISGAIAGAVAGCAATIEIGCVEGAIAGIGPSGIASMIAALWTCRSKY

SEQ ID NO: 1487 - protein, 18 aa, Sus scrofa
RGGRLCYCRRRFCVCVGR

SEQ ID NO: 1488 - protein, 16 aa, Sus scrofa
RGGRLCYCRRRFCICV

SEQ ID NO: 1489 - protein, 18 aa, Sus scrofa
RGGGLCYCRRRFCVCVGR

SEQ ID NO: 1490 - protein, 58 aa, Phyllomedusa sauvagii
VIEPKCYKYEGKKCPPDINPVCGTDKRTYYNECALCVFIRQSTKKADKAIKIKKWGKC

SEQ ID NO: 1491 - protein, 12 aa, Lysobacter sp.
  strain XL 1
  MOD_RES (8)..(8): Any amino acid
ATVQGGIXYRMP

SEQ ID NO: 1492 - protein, 12 aa, Protonectarina sylveirae
ILGTILGLLKGL

SEQ ID NO: 1493 - protein, 12 aa, Agelaia pallipes
ILGTILGLLKGL

SEQ ID NO: 1494 - protein, 33 aa, Psalmopoeus cambridgei
ACGILHDNCVYVPAQNPCCRGLQCRYGKCLVQV

SEQ ID NO: 1495 - protein, 28 aa, Psalmopoeus cambridgei
RCLPAGKTCVRGPMRVPCCGSCSQNKCT

SEQ ID NO: 1496 - protein, 24 aa, Pseudis paradoxa
GLNTLKKVFQGLHEAIKLINNHVQ

SEQ ID NO: 1497 - protein, 24 aa, Pseudis paradoxa
GLNALKKVFQGIHEAIKLINNHVQ

SEQ ID NO: 1498 - protein, 23 aa, Pseudis paradoxa
GINTLKKVIQGLHEVIKLVSNHE

SEQ ID NO: 1499 - protein, 23 aa, Pseudis paradoxa
GINTLKKVIQGLHEVIKLVSNHA

SEQ ID NO: 1500 - protein, 20 aa, Solanum tuberosum
RNCESLSHRFKGPCTRDSNC

SEQ ID NO: 1501 - protein, 45 aa, Oiketicus kirbyi
INNWVRVPPCDQVCSRTNPEKDECCRAHGHAFHATCSGGMQCYRR

SEQ ID NO: 1502 - protein, 118 aa, Triticum aestivum
DVAGGGGAQQCPVETKLNSCRNYLLDRCSTMKDFPVTWRWWKWWKGGCQELLGECCSRLGQMPPQCRCNIIQGSIQGDLGGIFGFQRDRASKVIQEAKNLPPRCNQGPPCNIPGTIGY

SEQ ID NO: 1503 - protein, 119 aa, Triticum aestivum
EVGGGGGSQQCPQERPKLSSCKDYVMERCFTMKDFPVTWPTKWWKGGCEHEVREKCCKQLSQIAPQCRCDSIRRVIQGRLGGFLGIWRGEVFKQLQRAQSLPSKCNMGADCKFPSGYYW

SEQ ID NO: 1504 - protein, 37 aa, Ciona intestinalis
AALRGALRAVARVGKAILPHVAIANPYVRTPYVHNNP

SEQ ID NO: 1505 - protein, 17 aa, Tityus costatus
FLGMIPGLIGGLISAFK

SEQ ID NO: 1506 - protein, 17 aa, Tityus costatus
FFSLIPSLIGGLVFAIK

SEQ ID NO: 1507 - protein, 17 aa, Tityus costatus
FFSLIPSLIGGLVSAIK

SEQ ID NO: 1508 - protein, 20 aa, Pyrrhocoris apterus
VDKGSYLPRPTPPRPIYNRN

SEQ ID NO: 1509 - protein, 17 aa, Pelophylax esculentus
SAPRGCWTKSYPPKPCK

SEQ ID NO: 1510 - protein, 17 aa, Rana temporaria
GALRGCWTKSYPPKPCK

SEQ ID NO: 1511 - protein, 20 aa, Rana catesbeiana
FLGGLIKIVPAMICAVTKKC

SEQ ID NO: 1512 - protein, 16 aa, Rana catesbeiana
LIKIVPAMICAVTKKC

SEQ ID NO: 1513 - protein, 17 aa, Rana catesbeiana
GLIKIVPAMICAVTKKC

SEQ ID NO: 1514 - protein, 18 aa, Rana catesbeiana
GGLIKIVPAMICAVTKKC

SEQ ID NO: 1515 - protein, 19 aa, Rana catesbeiana
LGGLIKIVPAMICAVTKKC

SEQ ID NO: 1516 - protein, 19 aa, Rana catesbeiana
FLGGLIKIVPAMICAVTKK

SEQ ID NO: 1517 - protein, 20 aa, Rana clamitans
FLGGLMKAFPALICAVTKKC

SEQ ID NO: 1518 - protein, 20 aa, Rana clamitans
FLGGLMKAFPAIICAVTKKC

SEQ ID NO: 1519 - protein, 28 aa, Rana sakuraii
GLLDAIKDTAQNLFANVLDKIKCKFTKC

SEQ ID NO: 1520 - protein, 25 aa, Rana catesbeiana
SMLSVLKNLGKVGLGFVACKINKQC

SEQ ID NO: 1521 - protein, 25 aa, Rana clamitans
SMLSVLKNLGKVGLGLVACKINKQC

SEQ ID NO: 1522 - protein, 33 aa, Rana temporaria
GLLSGLKKVGKHVAKNVAVSLMDSLKCKISGDC

SEQ ID NO: 1523 - protein, 31 aa, Rana catesbeiana
GLFLDTLKGAAKDVAGKLEGLKCKITGCKLP

SEQ ID NO: 1524 - protein, 28 aa, Rana berlandieri
GLLDTIKGVAKTVAASMLDKLKCKISGC

SEQ ID NO: 1525 - protein, 32 aa, Rana boylii
GILSTFKGLAKGVAKDLAGNLLDKFKCKITGC

SEQ ID NO: 1526 - protein, 28 aa, Rana boylii
GIMDSVKGLAKNLAGKLLDSLKCKITGC

SEQ ID NO: 1527 - protein, 31 aa, Rana clamitans
GLFLDTLKGAAKDVAGKLLEGLKCKIAGCKP

SEQ ID NO: 1528 - protein, 27 aa, Rana clamitans
GLFLDTLKGLAGKLLQGLKCIKAGCKP

SEQ ID NO: 1529 - protein, 32 aa, Rana cascadae
GILSSFKGVAKGVAKDLAGKLLETLKCKITGC

SEQ ID NO: 1530 - protein, 32 aa, Rana luteiventris
GILDSFKGVAKGVAKDLAGKLLDKLKCKITGC

SEQ ID NO: 1531 - protein, 32 aa, Rana luteiventris
GILSSIKGVAKGVAKNVAAQLLDTLKCKITGC

SEQ ID NO: 1532 - protein, 27 aa, Rana pipiens
LMDTVKNVAKNLAGHMLDKLKCKITGC

SEQ ID NO: 1533 - protein, 29 aa, Rana sevosa
GFISTVKNLATNVAGTVIDTIKCKVTGGC

SEQ ID NO: 1534 - protein, 28 aa, Rana sevosa
AIMDTIKDTAKTVAVGLLNKLKCKITGC

SEQ ID NO: 1535 - protein, 28 aa, Rana sevosa
GIMDTIKDTAKTVAVGLLNKLKCKITGC

SEQ ID NO: 1536 - protein, 32 aa, Rana catesbeiana
GFLDIINKLGKTFAGHMLDKIKCTIGTCPPSP

SEQ ID NO: 1537 - protein, 24 aa, Rana catesbeiana
FLPFIARLAAKVFPSIICSVTKKC

SEQ ID NO: 1538 - protein, 12 aa, Rana catesbeiana
FLPIASLLGKYL

SEQ ID NO: 1539 - protein, 13 aa, Rana catesbeiana
FISAIASMLGKFL

SEQ ID NO: 1540 - protein, 13 aa, Rana catesbeiana
FLSAIASMLGKFL

SEQ ID NO: 1541 - protein, 13 aa, Rana catesbeiana
FISAIASFLGKFL

SEQ ID NO: 1542 - protein, 14 aa, Rana catesbeiana
FLFPLITSFLSKVL

SEQ ID NO: 1543 - protein, 32 aa, Artificial Sequence; identical to SEQ ID NO: 1529
  Description of Artificial Sequence: Synthetic Anti-viral polypeptide

SEQ ID NO: 1544 - protein, 43 aa, Crassostrea gigas
GFGCPGNQLKCNNHCKSISCRAGYCDAATLWLRCTCTDCNGKK

SEQ ID NO: 1545 - protein, 57 aa, Lactobacillus reuteri
  Lactobacillus reuteri LA6
IYWIADQFGIHLATGTARKLLDAMASGASLGTAFAAILGVTLPAWALAAAGALGATA

SEQ ID NO: 1546 - protein, 36 aa, Macaca mulatta; identical to SEQ ID NO: 350

SEQ ID NO: 1547 - protein, 72 aa, Oryctes rhinoceros
SLQPGAPNFPMPGSQLPTSITSNIEKQGPNTAATINAQHKTDRYDVGATWSKVIRGPGRSKPNWSIGGTYRW

SEQ ID NO: 1548 - protein, 34 aa, Oryctolagus cuniculus
KPYCSCKWRCGIGEEEKGICHKFPIVTYVCCRRP

SEQ ID NO: 1549 - protein, 37 aa, Macaca mulatta; identical to SEQ ID NO: 187

SEQ ID NO: 1550 - protein, 29 aa, Rana pipiens
GFLSTVKNLATNVAGTVIDTIKCKVTGGC

SEQ ID NO: 1551 - protein, 51 aa, Apis mellifera
VTCDLLSFKGQVNDSACAANCLSLGKAGGHCEKVGCICRKTSFKDLWDKYF

SEQ ID NO: 1552 - protein, 18 aa, Artificial Sequence
  Description of Artificial Sequence: Synthetic Anti-viral polypeptide
ALYKKFKKKLLKSLKRLG

SEQ ID NO: 1553 - protein, 18 aa, Macaca mulatta
GFCRCLCRRGVCRCICTR

SEQ ID NO: 1554 - protein, 18 aa, Macaca mulatta
GVCRCLCRRGVCRCLCRR

SEQ ID NO: 1555 - protein, 33 aa, Glandirana rugosa
GLLNTFKDWAISIAKGAGKGVLTTLSCKLDKSC

SEQ ID NO: 1556 - protein, 19 aa, Pelophylax saharicus
KGAAKGLLEVASCKLSKSC

SEQ ID NO: 1557 - protein, 33 aa, Glandirana rugosa
SLFSLIKAGAKFLGKNLLKQGAQYAACKVSKEC

SEQ ID NO: 1558 - protein, 37 aa, Glandirana rugosa
GILDSFKQFAKGVGKDLIKGAAQGVLSTMSCKLAKTC

SEQ ID NO: 1559 - protein, 21 aa, Ruminococcus gnavus
GNGVLKTISHECNMNTWQFLF

SEQ ID NO: 1560 - protein, 43 aa, Lactobacillus sakei
  Lactobacillus sakei 5
KYYGNGLSCNKSGCSVDWSKAISIIGNNAVANLTTGGAAGWKS

SEQ ID NO: 1561 - protein, 37 aa, Lactobacillus sakei
  Lactobacillus sakei 2512
KYYGNGVSCNSHGCSVNWGQAWTCGVNHLANGGHGVC

SEQ ID NO: 1562 - protein, 18 aa, Lactobacillus sakei
KYYGNGVHCGKHSCTVDW

SEQ ID NO: 1563 - protein, 25 aa, Streptococcus salivarius
  Streptococcus salivarius K12
GGGVIQTISHECRMNSWQFLFTCCS

SEQ ID NO: 1564 - protein, 24 aa, Haemaphysalis longicornis
NCIQQCVSKGAQGGYCTNEKCTCY

SEQ ID NO: 1565 - protein, 15 aa, Oncorhynchus mykiss
  MOD_RES (1)..(2): Any amino acid
  MOD_RES (14)..(14): Any amino acid
XXSVPAFGHYLPAXP

SEQ ID NO: 1566 - protein, 13 aa, Oncorhynchus mykiss
SGFVLKGYTKTSQ

SEQ ID NO: 1567 - protein, 13 aa, Oncorhynchus mykiss
AGFVLKGYTKTSQ

SEQ ID NO: 1568 - protein, 16 aa, Oncorhynchus mykiss
  MOD_RES (1)..(2): Any amino acid
  MOD_RES (13)..(13): Any amino acid
XXPQQLGHVKAAXSDY

SEQ ID NO: 1569 - protein, 46 aa, Homo sapiens [sequence omitted]

SEQ ID NO: 1570 - protein, 30 aa, Salmo salar
AEVAPAPAAAAPAKAPKKKAAAKPKKAGPS

SEQ ID NO: 1571 - protein, 40 aa, Sarcophaga peregrina
ATCDLLSGTGINHSACAAHCLLRGNRGGYCNGKAVCVCRN

SEQ ID NO: 1572 - protein, 34 aa, Sarcophaga peregrina
LTCEIDRSLCLLHCRLKGYLRAYCSQQKVCRCVQ

SEQ ID NO: 1573 - protein, 40 aa, Sarcophaga peregrina
ATCDLLSGIGVQHSACALHCVFRGNRGGYCTGKGICVCRN

SEQ ID NO: 1574 - protein, 270 aa, Sarcophaga peregrina
QKLPVPIPPPTNPPVAAFHNSVATNSKGGQDVSVKLAATNLGNKHVQPIAEVFAKGNTQGGNVLRGATVGVQGHGLGASVTKTQDGIAESFRKQAEANLRLGDSASLIGKVSQTDTKIKGIDFKPQLSSSSLALQGDRLGASISRDVNRGVSDTLTKSISANVFRNDNHNLDASVFRSDVRQNNGFNFQKTGGMLDYSHANGHGLNAGLTRFSGIGNQANVGGYSTLFRSNDGLTSLKANAGGSQWLSGPFANQRDYSFGLGLSHNAWRG

SEQ ID NO: 1575 - protein, 269 aa, Sarcophaga peregrina
QKLPVPIPPPTNPPVAAFHNSVATNSKGGQDVSVKLAATNLGNKHVQPIAEVFAEGNTKGGNVIRGATVGVQGHGLGASVTKSGNGIAESFRKQAEANLRLGDSASLIGKVSQTDTKIKGIDFKPQLSSSSLALQGDRLGASISRDVNRGVSDTLTKSISANVFRNDNHNLDASVFRSDVRQNNGFNFQKTGGMLDYSHANGHGLNAGLTRFSGIGNQANVGGYSTLFRSNDGLTSLKANAGGSQWLSGPFANQRDYSFGLGLSHNAWR

SEQ ID NO: 1576 - protein, 39 aa, Sarcophaga peregrina; identical to SEQ ID NO: 683

SEQ ID NO: 1577 - protein, 39 aa, Sarcophaga peregrina
GWLKKIGKKIERVGQHTRDATIQVIGVAQQAANVAATAR

SEQ ID NO: 1578 - protein, 39 aa, Sarcophaga peregrina
GWLRKIGKKIERVGQHTRDATIQVLGIAQQAANVAATAR

SEQ ID NO: 1579 - protein, 40 aa, Sarcophaga peregrina
GWIRDFGKRIERVGQHTRDATIQTIAVAQQAANVAATLKG

SEQ ID NO: 1580 - protein, 269 aa, Sarcophaga peregrina
QKLPVPIPPPTNPPVAAFHNSVATNSKGGQDVSVKLAATNLGNKHVQPIAEVFAEGNTKGGNVLRGATVGVQGHGLGASVTKSQDGIAESFRKQAEANLRLGDSASLIGKVSQTDTKIKGIDFKPQLSSSSLALQGDRLGASISRDVNRGVSDTLTKSVSANLFRNDNHNLDASVFRSDVRQNNGFNFQKTGGMLDYSHANGHGLNAGLTRFSGIGNQATVGGYSTLFRSNDGLTSLKANAGGSQWLSGPFANQRDYSFGLGLSHNAWR

SEQ ID NO: 1581 - protein, 241 aa, Sarcophaga peregrina
QKLPVPIPPPSNPPVAVLQNSVATNSKGGQDVSVKLSATNLGNNHVQPIAEVFAEGNTKGGNVLRGATVGVQGHGLGASVTKTQTDTKIKGLDFQPQLSSSTLALQGDRLGASISRDVNRGVSDTFTKSVSANVFRNDNHNLDATVFRSDVRQNNGFNFQKTGGMLDYSHANGHGLNAGLTHFSGIGNQANVGGSSTLFKSNDGSLSLKANAGGSQWLSGPFSNQRDYNVGLSLTHHGCGG

SEQ ID NO: 1582 - protein, 36 aa, Oryctes rhinoceros
ELPKLPDDKVLIRSRSNCPKGKVWNGFDCKSPFAFS

SEQ ID NO: 1583 - protein, 68 aa, Tityus costatus
GLREKHVQKLVALIPNDQLRSILKAVVHKVAKTQFGCPAYEGYCNNHCQDIERKDGECHGFKCKCAKD

SEQ ID NO: 1584 - protein, 13 aa, Bos taurus
QKIAEKFSGTRRG

SEQ ID NO: 1585 - protein, 48 aa, Bos taurus
SDEKASPDKHHRFSLSRYAKLANRLANPKLLETFLSKWIGDRGNRSVK

SEQ ID NO: 1586 - protein, 28 aa, Capsella bursa-pastoris
GYGGHGGHGGHGGHGGHGGHGHGGGGHG

SEQ ID NO: 1587 - protein, 38 aa, Capsella bursa-pastoris
GYHGGHGGHGGGYNGGGGHGGHGGGYNGGGHHGGGGHG

SEQ ID NO: 1588 - protein, 42 aa, Bean golden mosaic virus
  Bean golden mosaic virus Brazil
GKIPVKAIKKAGAAIGKGLRAINIASTAHDVYSFFKPKHKKK

SEQ ID NO: 1589 - protein, 30 aa, Rhizomucor pusillus
ACLPNSCVSKGCCCGBSGYWCRQCGIKYTC

SEQ ID NO: 1590 - protein, 23 aa, Phyllomedusa bicolor
PEEMNKYLTALRHYINLVTRQRY

SEQ ID NO: 1591 - protein, 29 aa, Ovis aries
RGLRRLGRKIAHGVKKYGPTVLRIIRIAG

SEQ ID NO: 1592 - protein, 63 aa, Solanum tuberosum
GSSFCDSKCKLRCSKAGLADRCLKYCGICCEECKCVPSGTYGNKHECPCYRDKKNSKGKSKCP

SEQ ID NO: 1593 - protein, 66 aa, Solanum tuberosum
YSYKKIDCGGACAARCRLSSRPRLCNRACGTCCARCNCVPPGTSGNTETCPCYASLTTHGNKRKCP

SEQ ID NO: 1594 - protein, 25 aa, Artificial Sequence
  Description of Artificial Sequence: Synthetic Anti-viral polypeptide
HVDKKVADKVLLLKQLRIMRLLTRL

SEQ ID NO: 1595 - protein, 53 aa, Macaca mulatta
APIIRRIPYYPEVESDLRIVDCKRSEGFCQEYCNYLETQVGYCSKKKDACCLH

SEQ ID NO: 1596 - protein, 62 aa, Macaca mulatta
GDVPPGIRNTICLMQQGTCRLFFCHSGEKKRDICSDPWNRCCVSNRDEEGKEKPKTDGRSGI

SEQ ID NO: 1597 - protein, 36 aa, Bos taurus
RNIICLMQHGTCRLFFCRSGEKKSEICSDPWNRCCI

SEQ ID NO: 1598 - protein, 52 aa, Mus musculus
PGDIPPGIRNTVCLMQQGHCRLFMCRSGERKGDICSDPWNRCCVPYSVKDRR

SEQ ID NO: 1599 - protein, 38 aa, Aptenodytes patagonicus
SFGLCRLRRGFCAHGRCRFPSIPIGRCSRFVQCCRRVW

SEQ ID NO: 1600 - protein, 38 aa, Aptenodytes patagonicus
SFGLCRLRRGFCARGRCRFPSIPIGRCSRFVQCCRRVW

SEQ ID NO: 1601 - protein, 42 aa, Stomoxys calcitrans
RGFRKHFNKLVKKVKHTISETAHVAKDTAVIAGSGAAVVAAT

SEQ ID NO: 1602 - protein, 20 aa, Styela clava
  MOD_RES (2)..(2): Any amino acid
  MOD_RES (8)..(8): Any amino acid
GXFGKAFXSVSNFAKKHKTA

SEQ ID NO: 1603 - protein, 20 aa, Styela clava
  MOD_RES (2)..(2): Any amino acid
  MOD_RES (8)..(8): Any amino acid
GXFGKAFXSVSNFAKKHKTA

SEQ ID NO: 1604 - protein, 31 aa, Styela clava
GWFGKAFRSVSNFYKKHKTYIHAGLSAATLL

SEQ ID NO: 1605 - protein, 32 aa, Styela clava
GWLRKAAKSVGKFYYKHKYYIKAAWQIGKHAL

SEQ ID NO: 1606 - protein, 33 aa, Styela clava
GWLRKAAKSVGKFYYKHKYYIKAAWKIGRHALG

SEQ ID NO: 1607 - protein, 72 aa, Ascaris suum
AVDFSSCARMDVPGLSKVAQGLCISSCKFQNCGTGHCEKRGGRPTCVCDRCGRGGGEWPSVPMPKGRSSRGR

SEQ ID NO: 1608 - protein, 12 aa, Bacillus subtilis
  MOD_RES (1)..(2): Any amino acid
  MOD_RES (6)..(6): Any amino acid
XXKEIXWIFHDN

SEQ ID NO: 1609 - protein, 12 aa, Bacillus subtilis
  MOD_RES (1)..(2): Any amino acid
  MOD_RES (6)..(6): Any amino acid
XXKEIXHIFHDN

SEQ ID NO: 1610 - protein, 35 aa, Bacillus subtilis
NKGCATCSIGAACLVDGPIPDFEIAGATGLFGLWG

SEQ ID NO: 1611 - protein, 25 aa, Leptodactylus syphax
GVLDILKGAAKDLAGHVATKVINKI

SEQ ID NO: 1612 - protein, 17 aa, Carcinoscorpius rotundicauda
KWCFRVCYRGICYRRCR

SEQ ID NO: 1613 - protein, 73 aa, Tachypleus tridentatus
YLAFRCGRYSPCLDDGPNVNLYSCCSFYNCHKCLARLENCPKGLHYNAYLKVCDWPSKAGCTSVNKECHLWKT

SEQ ID NO: 1614 - protein, 17 aa, Tachypleus gigas
KWCFRVCYRGICYRRCR

SEQ ID NO: 1615 - protein, 17 aa, Tachypleus tridentatus
KWCFRVCYRGICYRRCR

SEQ ID NO: 1616 - protein, 17 aa, Tachypleus tridentatus
RWCFRVCYRGICYRKCR

SEQ ID NO: 1617 - protein, 17 aa, Tachypleus gigas
KWCFRVCYRGICYRKCR

SEQ ID NO: 1618 - protein, 44 aa, Tachypleus tridentatus
YSRCQLQGFNCVVRSYGLPTIPCCRGLTCRSYFPGSTYGRCQRF

SEQ ID NO: 1619 - protein, 44 aa, Tachypleus tridentatus
YSRCQLQGFNCVVRSYGLPTIPCCRGLTCRSYFPGSTYGRCQRY

SEQ ID NO: 1620 - protein, 42 aa, Tachypleus tridentatus
YVSCLFRGARCRVYSGRSCCFGYYCRRDFPGSIFGTCSRRNF

SEQ ID NO: 1621 - protein, 42 aa, Tachypleus tridentatus
YITCLFRGARCRVYSGRSCCFGYYCRRDFPGSIFGTCSRRNF

SEQ ID NO: 1622 - protein, 41 aa, Tachypleus tridentatus
DYDWSLRGPPKCATYGQKCRTWSPPNCCWNLRCKAFRCRPR

SEQ ID NO: 1623 - protein, 269 aa, Tachypleus tridentatus
QNKELCDVTSSTGLLDSIKVMASHVKEQLKDKGTSEVAQPIVSPDPTDCADILLNGYRSSGGYRIWPKSWMTVGTLNVYCDMETDGGGWTVIQRRGNYGNPSDYFYKPWKNYKLGFGNIEKDFWLGNDRIFALTNQRNYMIRFDLKDKENDTRYAIYQDFWIENEDYLYCLHIGNYSGDAGNSFGRHNGHNFSTIDKDHDTHETHCAQTYKGGWWYDRCHESNLNGLYLNGEHNSYADGIEWRAWKGYHYSLPQVEMKIRPVEFNIIGN

SEQ ID NO: 1624 - protein, 289 aa, Tachypleus tridentatus
DVHHHAACSTVCSLKGILDSVSDLTDLAKERLATLQNPICSKDKAFYMETYTNVTQNKAEKNGLPINCATVYQQGNRTSGIYMIWPLFLNHPISVFCDMETAGGGWTVIQRRGDFGQPIQNFYQTWESYKNGFGNLTKEFWLGNDIIFVLTNQDSVVLRVDLEDFEGGRRYAEAVEFLVRSEIELYKMSFKTYKGDAGDSLSQHNNMPFTTKDRDNDKWEKNCAEAYKGGWWYNACHHSNLNGMYLRGPHEESAVGVNWYQWRGHNYSLKVSEMKIRPIIFVPGEGLPK

SEQ ID NO: 1625 - protein, 13 aa, Rana boylii
FLPIIAKVLSGLL

SEQ ID NO: 1626 - protein, 13 aa, Rana clamitans
FLPFLAKILTGVL

SEQ ID NO: 1627 - protein, 13 aa, Rana clamitans
FLPLFASLIGKLL

SEQ ID NO: 1628 - protein, 13 aa, Rana clamitans
FLPFLASLLTKVL

SEQ ID NO: 1629 - protein, 13 aa, Rana clamitans
FLPFLASLLSKVL

SEQ ID NO: 1630 - protein, 13 aa, Rana clamitans
FLPFLATLLSKVL

SEQ ID NO: 1631 - protein, 17 aa, Rana chensinensis
FVDLKKIANIINSIFGK

SEQ ID NO: 1632 - protein, 13 aa, Rana cascadae
FLPIVGKLLSGLL

SEQ ID NO: 1633 - protein, 13 aa, Rana cascadae
FLPIIGKLLSGLL

SEQ ID NO: 1634 - protein, 13 aa, Rana cascadae
FLPLVTGLLSGLL

SEQ ID NO: 1635 - protein, 14 aa, Rana cascadae
NFLGTLVNLAKKIL

SEQ ID NO: 1636 - protein, 14 aa, Rana dybowskii
FIGPIISALASLFG

SEQ ID NO: 1637 - protein, 14 aa, Rana grylio
SILPTIVSFLSKFL

SEQ ID NO: 1638 - protein, 14 aa, Rana grylio
SILPTIVSFLTKFL

SEQ ID NO: 1639 - protein, 14 aa, Rana grylio
FILPLIASFLSKFL

SEQ ID NO: 1640 - protein, 13 aa, Rana japonica
ILPLVGNLLNDLL

SEQ ID NO: 1641 - protein, 13 aa, Rana luteiventris
VLPLISMALGKLL

SEQ ID NO: 1642 - protein, 14 aa, Rana luteiventris
NFLGTLINLAKKIM

SEQ ID NO: 1643 - protein, 14 aa, Rana luteiventris
FLPILINLIHKGLL

SEQ ID NO: 1644 - protein, 13 aa, Rana ornativentris
FLPLLASLFSRLL

SEQ ID NO: 1645 - protein, 15 aa, Rana ornativentris
FLPLIGKILGTILGK

SEQ ID NO: 1646 - protein, 13 aa, Rana ornativentris
FLPLLASLFSRLF

SEQ ID NO: 1647 - protein, 13 aa, Rana ornativentris
FLPLLASLFSGLF

SEQ ID NO: 1648 - protein, 13 aa, Rana pipiens
FLPIVGKLLSGLL

SEQ ID NO: 1649 - protein, 13 aa, Pelophylax saharicus
FLSGIVGMLGKLF

SEQ ID NO: 1650 - protein, 13 aa, Pelophylax saharicus
FLPIVTNLLSGLL

SEQ ID NO: 1651 - protein, 13 aa, Pelophylax saharicus
FLSHIAGFLSNLF

SEQ ID NO: 1652 - protein, 17 aa, Rana sakuraii
FLPVILPVIGKLLSGIL

SEQ ID NO: 1653 - protein, 13 aa, Rana tagoi
FLPILGKLLSGIL

SEQ ID NO: 1654 - protein, 16 aa, Rana tagoi
AVDLAKIANKVLSSLF

SEQ ID NO: 1655 - protein, 17 aa, Rana tagoi
FLPVILPVIGKLLSGIL

SEQ ID NO: 1656 - protein, 13 aa, Rana tsushimensis
FLGALAKIISGIF

SEQ ID NO: 1657 - protein, 13 aa, Rana catesbeiana
FLSSIGKILGNLL

SEQ ID NO: 1658 - protein, 13 aa, Rana catesbeiana
FLSIIAKVLGSLF

SEQ ID NO: 1659 - protein, 13 aa, Rana catesbeiana
FLPLVTMLLGKLF

SEQ ID NO: 1660 - protein, 13 aa, Rana temporaria
FLPLIGRVLSGIL

SEQ ID NO: 1661 - protein, 13 aa, Rana temporaria
LLPIVGNLLKSLL

SEQ ID NO: 1662 - protein, 13 aa, Rana temporaria
LLPILGNLLNGLL

SEQ ID NO: 1663 - protein, 13 aa, Rana temporaria
LLPIVGNLLNSLL

SEQ ID NO: 1664 - protein, 13 aa, Rana temporaria
VLPIIGNLLNSLL

SEQ ID NO: 1665 - protein, 13 aa, Rana temporaria
FLPLIGKVLSGIL

SEQ ID NO: 1666 - protein, 13 aa, Rana temporaria
FFPVIGRILNGIL

SEQ ID NO: 1667 - protein, 13 aa, Hylarana guentheri
FLPLLFGAISHLL

SEQ ID NO: 1668 - protein, 10 aa, Rana temporaria
LLPNLLKSLL

SEQ ID NO: 1669 - protein, 13 aa, Rana temporaria
FVQWFSKFLGRIL

SEQ ID NO: 1670 - protein, 13 aa, Hylarana picturata
FFGSVLKLIPKIL

SEQ ID NO: 1671 - protein, 43 aa, Tenebrio molitor
VTCDILSVEAKGVKLNDAACAAHCLFRGRSGGYCNGKRVCVCR

SEQ ID NO: 1672 - protein, 36 aa, Pseudacanthotermes spiniger
ACNFQSCWATCQAQHSIYFRRAFCDRSQCKCVFVRG

SEQ ID NO: 1673 - protein, 21 aa, Podisus maculiventris
GSKKPVPIIYCNRRTGKCQRM

SEQ ID NO: 1674 - protein, 75 aa, Theromyzon tessulatum
GCFEDWSRCSPSTSRGTGVLWRDCDSYCKVCFKADRGECFDSPSLNCPQRLPNNKQCRCINARTAKDNRNPTCWA

SEQ ID NO: 1675 - protein, 75 aa, Hirudo medicinalis
GCFEDWSRCSPSTASATGVLWRSCDSYCKVCFKADRGECYDSPSLNCPHRLPNNKQCRCINARTAKDNRNPTCWA

SEQ ID NO: 1676 - protein, 86 aa, Theromyzon tessulatum
DHHHDHGHDDHEHEELTLEKIKEKIKDYADKTPVDQLTERVQAGRDYLLGKGARPSHLPARVDRHLSKLTAAEKQELADYLLTFLH

SEQ ID NO: 1677 - protein, 14 aa, Bacillus cereus
SCTTCVCTCSCCTT

SEQ ID NO: 1678 - protein, 14 aa, Bacillus badius
SCTTCVCTCSCCTT

SEQ ID NO: 1679 - protein, 14 aa, Bacillus cereus
SCTTCVCTCSCCTT

SEQ ID NO: 1680 - protein, 14 aa, Streptomyces sp.
STNCFCYPCCSCSS

SEQ ID NO: 1681 - protein, 47 aa, Pyrularia pubera
KSCCRNTWARNCYNVCRLPGTISREICAKKCDCKIISGTTCPSDYPK

SEQ ID NO: 1682 - protein, 17 aa, Streptomyces azureus
IASASCTTCICTCSCSS

SEQ ID NO: 1683 - protein, 11 aa, Hoplobatrachus tigerinus
FCTMIPIPRCY

SEQ ID NO: 1684 - protein, 12 aa, Hoplobatrachus tigerinus
RVCFAIPLPICH

SEQ ID NO: 1685 - protein, 12 aa, Hoplobatrachus tigerinus
RVCYAIPLPICY

SEQ ID NO: 1686 - protein, 11 aa, Hoplobatrachus tigerinus
RVCYAIPLPIC

SEQ ID NO: 1687 - protein, 38 aa, Bos taurus
NPVSCVRNKGICVPIRCPGNMKQIGTCVGRAVKCCRKK

SEQ ID NO: 1688 - protein, 36 aa, Bos taurus
NPVSCVRNKGICVPIRCPGNMKQIGTCVGRAVKCCR

SEQ ID NO: 1689 - protein, 38 aa, Bos taurus
NPVSCVRNKGICVPIRCPGSMKQIGTCVGRAVKCCRKK

SEQ ID NO: 1690 - protein, 19 aa, Trichoderma longibrachiatum
AGFAAQAAASLAPVAAQQL

SEQ ID NO: 1691 - protein, 19 aa, Trichoderma longibrachiatum
AGFAAQAAASLAPVAIQQL

SEQ ID NO: 1692 - protein, 21 aa, Streptomyces sp.
CLGVGSCNNFAGCGYAIVCFW

SEQ ID NO: 1693 - protein, 13 aa, Sus scrofa
VRRFPWWWPFLRR

SEQ ID NO: 1694 - protein, 19 aa, Uperoleia inundata
GIVDFAKKVVGGIRNALGI

SEQ ID NO: 1695 - protein, 19 aa, Uperoleia inundata
GFVDLAKKVVGGIRNALGI

SEQ ID NO: 1696 - protein, 19 aa, Uperoleia inundata
GFFDLAKKVVGGIRNALGI

SEQ ID NO: 1697 - protein, 19 aa, Uperoleia inundata
GILDFAKTVVGGIRNALGI

SEQ ID NO: 1698 - protein, 19 aa, Uperoleia inundata
GIVDFAKGVLGKIKNVLGI

SEQ ID NO: 1699 - protein, 19 aa, Uperoleia mjobergii
GILDVAKTLVGKLRNVLGI

SEQ ID NO: 1700 - protein, 17 aa, Uperoleia inundata
GVLDAFRKIATVVKNVV

SEQ ID NO: 1701 - protein, 17 aa, Uperoleia mjobergii
GVGDLIRKAVSVIKNIV

SEQ ID NO: 1702 - protein, 17 aa, Uperoleia mjobergii
GVIDAAKKVVNVLKNLP

SEQ ID NO: 1703 - protein, 17 aa, Uperoleia inundata
GVGSFIHKVVSAIKNVA

SEQ ID NO: 1704 - protein, 13 aa, Litoria ewingii
GWFDVVKHIASAV

SEQ ID NO: 1705 - protein, 25 aa, Kocuria varians
GSGVIPTISHECHMNSFQFVFTCCS

SEQ ID NO: 1706 - protein, 29 aa, Viola arvensis
GLPVCGETCVGGTCNTPGCSCSWPVCTRN

SEQ ID NO: 1707 - protein, 29 aa, Viola arvensis
GLPICGETCVGGTCNTPGCSCSWPVCTRN

SEQ ID NO: 1708 - protein, 29 aa, Viola arvensis
GVPICGETCTLGTCYTAGCSCSWPVCTRN

SEQ ID NO: 1709 - protein, 76 aa, Bos taurus
LPVNSPMNKGDTEVMKCIVEVISDTLSKPSPMPVSKECFETLRGDERILSILRHQNLLKELQDLALQGAKERTHQQ

SEQ ID NO: 1710 - protein, 13 aa, Vespa magnifica
FLPIIAKLLGGLL

SEQ ID NO: 1711 - protein, 13 aa, Vespa magnifica
FLPIPRPILLGLL

SEQ ID NO: 1712 - protein, 13 aa, Vespa magnifica
FLIIRRPIVLGLL

SEQ ID NO: 1713 - protein, 13 aa, Vespa magnifica
FLPIIGKLLSGLL

SEQ ID NO: 1714 - protein, 49 aa, Macadamia integrifolia
ESEFDRQEYEECKRQCMQLETSGQMRRCVSQCDKRFEEDIDWSKYDNQD

SEQ ID NO: 1715 - protein, 35 aa, Macadamia integrifolia
QCMQLETSGQMRRCVSQCDKRFEEDIDWSKYDNQE

SEQ ID NO: 1716 - protein, 41 aa, Macadamia integrifolia
DPQTDCQQCQRRCRQQESGPRQQQYCQRRCKEICEEEEEYN

SEQ ID NO: 1717 - protein, 41 aa, Macadamia integrifolia
DPQTECQQCQRRCRQQESDPRQQQYCQRRCKEICEEEEEYN

SEQ ID NO: 1718 - protein, 45 aa, Macadamia integrifolia
RQRDPQQQYEQCQERCQRHETEPRHMQTCQQRCERRYEKEKRKQQ

SEQ ID NO: 1719 - protein, 45 aa, Macadamia integrifolia
RQRDPQQQYEQCQKRCQRRETEPRHMQICQQRCERRYEKEKRKQQ

SEQ ID NO: 1720 - protein, 47 aa, Macadamia integrifolia
RQRDPQQQYEQCQERCQRHETEPRHMQTCQQRCERRYEKEKRKQQKR

SEQ ID NO: 1721 - protein, 47 aa, Macadamia integrifolia
RQRDPQQQYEQCQKRCQRRETEPRHMQICQQRCERRYEKEKRKQQKR

SEQ ID NO: 1722 - protein, 67 aa, Macadamia integrifolia
RQRDPQQQYEQCQERCQRHETEPRHMQTCQQRCERRYEKEKRKQQKRYEEQQREDEEKYEERMKEED

SEQ ID NO: 1723 - protein, 67 aa, Macadamia integrifolia
RQRDPQQQYEQCQKRCQRRETEPRHMQICQQRCERRYEKEKRKQQKRYEEQQREDEEKYEERMKEGD

SEQ ID NO: 1724 - protein, 35 aa, Macadamia integrifolia
KRDPQQREYEDCRRRCEQQEPRQQYQCQRRCREQQ

SEQ ID NO: 1725 - protein, 35 aa, Macadamia integrifolia
KRDPQQREYEDCRRHCEQQEPRLQYQCQRRCQEQQ

SEQ ID NO: 1726 - protein, 41 aa, Heliothis virescens
GKIPIGAIKKAGKAIGKGLRAVNIASTAHDVYTFFKPKKRH

SEQ ID NO: 1727 - protein, 88 aa, Papio anubis
VKGGIEKAGVCPADNVRCFKSDPPQCHTDQDCLGARKCCYLHCGFKCVIPVKKLEEGGNKDEDVSGPCPEPGWEAKSPGSSSTGCPQK

SEQ ID NO: 1728 - protein, 88 aa, Pan troglodytes
VKEDIEKAGVCPADNVRCFKSDPPQCHTDQDCLGERKCCYLHCGFKCVIPVKELEEGGNKDEDVSRPYPEPGWEAKCPGSSSTRCPQK

SEQ ID NO: 1729 - protein, 57 aa, Rattus norvegicus
GGVKGAEKGVCPPDNVRCIRGEDPQCHNDNDCKDQKICCYWHCGFKCVQPVKDSWEQ

SEQ ID NO: 1730 - protein, 60 aa, Mus musculus
RPEIKKKNVFSKPGYCPEYRVPCPFVLIPKCRRDKGCKDALKCCFFYCQMRCVDPWESPE

SEQ ID NO: 1731 - protein, 64 aa, Mus musculus
GGVKGEEKRVCPPDYVRCIRQDDPQCYSDNDCGDQEICCFWQCGFKCVLPVKDNSEEQIPQSKV

SEQ ID NO: 1732 - protein, 88 aa, Saimiri boliviensis
  Saimiri boliviensis boliviensis
VKGNTEKPGVCPADNVRCIKSDPPQCHTDQDCQGIRKCCYLHCGFKCVIPVKELEEGGSKDEDVSRPCPESGWEVKPPGFFSTRCPQK

SEQ ID NO: 1733 - protein, 67 aa, Pongo abelii
VKKGIEKAGVCPADNVRCFKSDPPQCHTDQDCLGERKCCYLHCGFKCVIPVKELEEGGNKDEDVSRP

SEQ ID NO: 1734 - protein, 88 aa, Macaca mulatta
VKGGIEKAGVCPADNIRCFKSDPPQCHTDQDCLGERKCCYLHCGFKCVIPVKKLEEGGNKDEDVSGPCPEPGWEAKSPGSSSTGCPQK

SEQ ID NO: 1735 - protein, 125 aa, Lemur catta
VKGGKEKWGNCPAEKGSCIKSGPSQCHADNDCPGDKKCCFLSCSFKCVSPDRIRKEGGNEDEDVSRSSPEPGGEPRPPGSSPSTSILSYYAVSFPPPGIGQMAPVPQGAESWNVGQEASPQKEWS

SEQ ID NO: 1736 - protein, 67 aa, Gorilla gorilla
  Gorilla gorilla gorilla
VKEGIEKAGVCPADNVRCFKSDPPQCHTDQDCLGERKCCYLHCGFKCVIPVKELEEGGNKDEDVSRP

SEQ ID NO: 1737 - protein, 88 aa, Colobus guereza
VKGGIEKAGVCPADNVRCFKSNPPQCHTDQDCLGERKCCYLHCGFKCVIPVKKLEEGGNKDEDVSGPHPEPGWEAKSPGSSSTGCPQI

SEQ ID NO: 1738 - protein, 88 aa, Chlorocebus aethiops
VKGGIEKAGVCPADNVRCFKSDPPQCHTDQDCLGERKCCYLHCGFKCVIPVKKLEEGGNKDEDVSGPCPEPGWEAKSPGSSSTGCPQK

SEQ ID NO: 1739 - protein, 88 aa, Callithrix jacchus
VKVNIEKPGVCPADNIRCIKSDPPQCHTDQDCQGIRKCCYLHCGFKCVIPVKELEEGGNKDEDVSRPCPEPGWEAKPPGVFSTRCPQK

SEQ ID NO: 1740 - protein, 69 aa, Aotus nancymaae
VKGNIEKPEVCPADNVRCIKSDPPQCHTDQDCQGIRKCCYLHCGFKCVIPVKELEEGGNQDEDVSRPCP

SEQ ID NO: 1741 - protein, 88 aa, Homo sapiens
VKEGIEKAGVCPADNVRCFKSDPPQCHTDQDCLGERKCCYLHCGFKCVIPVKELEEGGNKDEDVSRPYPEPGWEAKCPGSSSTRCPQK

SEQ ID NO: 1742 - protein, 60 aa, Mus musculus
QPRATRKGVTPKQGYCPEFLLDCPFVLLPVCSRDKGCKGTKKCCFYYCQMRCVEPWTTLT

SEQ ID NO: 1743 - protein, 94 aa, Pseudoferania polylepis
KILFGCGISPGNPFPCSLPGLTGNRCRRDYDCPQTLRCCNFRCSRSCRIPPVLPWSCPRNPFKCTIPGIDRCRYDYDCPGRQRCCYYSCSRICK

SEQ ID NO: 1744 - protein, 52 aa, Liophis poecilogyrus
QVVRPGSCPNVDVPIPPLGLCRTTCQTDANCQEGRKCCKNGCGFMTCETARF

SEQ ID NO: 1745 - protein, 111 aa, Philodryas olfersii
QEPDAAGQNTTAVAEKAGTCPQAELEMPDRNCTEACQSDAGCEENKKCCRTGCGTSCQIPDEKPGSCPNVDTPIPPLGLCKTTCSKDSDCSETKKCCKNGCGFMTCTTARP

SEQ ID NO: 1746 - protein, 52 aa, Philodryas olfersii
EQEKPGSCPNVDMPIPPLGLCKTTCSKDSDCSETKKCCKNGCGFMTCTTARP

SEQ ID NO: 1747 - protein, 58 aa, Philodryas olfersii
KTTKQLRLPKVKPGECPKVKIPPDYPCNQYCVWDFDCEGNKKCCPVGCAKECFPPGPL

SEQ ID NO: 1748 - protein, 52 aa, Rhabdophis tigrinus
  Rhabdophis tigrinus tigrinus
QDGKAGSCPDVNQPIPPLGVCKTTCATDSNCPDIQKCCKNGCGHMSCTRPST

SEQ ID NO: 1749 - protein, 51 aa, Thrasops jacksonii
ENEKAGSCPDVNQPIPPLGLCRNMCESDSGCPNNEKCCKNGCGFMTCSRPR

SEQ ID NO: 1750 - protein, 47 aa, Phaseolus vulgaris
  Phaseolus vulgaris cv white cloud bean
KTCENLADTFRGPCFATSNCDDHCKNKEHLLSGRCRDDFRCWCTRNC

SEQ ID NO: 1751 - protein, 24 aa, Pseudopleuronectes americanus
GKGRWLERIGKAGGIIIGGALDHL

SEQ ID NO: 1752 - protein, 20 aa, Pseudopleuronectes americanus
WLRRIGKGVKIIGGAALDHL

SEQ ID NO: 1753 - protein, 26 aa, Pseudopleuronectes americanus
GRRKRKWLRRIGKGVKIIGGAALDHL

SEQ ID NO: 1754 - protein, 24 aa, Pseudopleuronectes americanus
FLGALIKGAIHGGRFIHGMIQNHH

SEQ ID NO: 1755 - protein, 25 aa, Pseudopleuronectes americanus
GWGSIFKHGRHAAKHIGHAAVNHYL

SEQ ID NO: 1756 - protein, 19 aa, Pseudopleuronectes americanus
FFRLLFHGVHHGGGYLNAA

SEQ ID NO: 1757 - protein, 19 aa, Pseudopleuronectes americanus
FFRLLFHGVHHVGKIKPRA

SEQ ID NO: 1758 - protein, 19 aa, Glyptocephalus cynoglossus
GWKKWLRKGAKHLGQAAIK

SEQ ID NO: 1759 - protein, 21 aa, Glyptocephalus cynoglossus
GFWGKLFKLGLHGIGLLHLHL

SEQ ID NO: 1760 - protein, 26 aa, Glyptocephalus cynoglossus
AGWGSIFKHIFKAGKFIHGAIQAHND

SEQ ID NO: 1761 - protein, 25 aa, Xenopus laevis
GWASKIGQTLGKIAKVGLKELIQPK

SEQ ID NO: 1762 - protein, 414 aa, Bothrops jararacussu
EQQKFPYRYVEIVVVVDRRMVTKYNGDLKKIRKWVYELVNIVNNIYRSLNVHVALVGLEIWSKGDKITVQPDSDYTLNSFGEWRERDLLPRKKHDNAQLLTAVVFDGPTIGRAYIAGMCDPRHSVGVVMDHSKENLQVAVTMAHELGHNLGMEHDENQCHCDAPSCVMASVLSVVLSYEFSDCSQNQYQTYLTKHNPQCILNEPLLTVSGNELLEAGEECDCGAPENPCCDAATCKLRPGAQCAEGLCCDQCRFKGAGKICRRARGDNPDDRCTGQSADCPRNRFHRNGQPCLYNHGYCYNGKCPIMFYQCYFLFGSNATVAEDDCFNNNKKGDKYFYCRKENEKYIPCAQEDVKCGRLFCDNKKYPCHYNYSEDLDFGMVDHGTKCADGKVCSNRQCVDVNEAYKSTTVFSLI

What is claimed is:

1. A pharmaceutical composition comprising:
i) an effective amount of a synthetic messenger ribonucleic acid (mRNA) encoding an anti-viral polypeptide (AVP); and
ii) a pharmaceutically acceptable carrier,
wherein the synthetic mRNA comprises at least one nucleoside modification, and
wherein the anti-viral polypeptide is about 6 to about 100 amino acids in length.

2. The pharmaceutical composition of claim 1, wherein the anti-viral polypeptide is about 6 to about 75 amino acids in length.

3. The pharmaceutical composition of claim 1, wherein the anti-viral polypeptide is about 6 to about 50 amino acids in length.

4. The pharmaceutical composition of claim 1, wherein the anti-viral polypeptide is 15 to about 45 amino acids in length.

5. The pharmaceutical composition of claim 1, wherein the anti-viral polypeptide is substantially cationic and amphipathic.

6. The pharmaceutical composition of claim 1, wherein the anti-viral polypeptide is cytostatic or cytotoxic to a virus.

7. The pharmaceutical composition of claim 1, wherein the at least one nucleoside modification is selected from the group consisting of pyridin-4-one ribonucleoside, 5-aza-uridine, 2-thio-5-aza-uridine, 2-thiouridine, 4-thio-pseudouridine, 2-thio-pseudouridine, 5-hydroxyuridine, 3-methyluridine, 5-carboxymethyl-uridine, 1-carboxymethyl-pseudouridine, 5-propynyl-uridine, 1-propynyl-pseudouridine, 5-taurinomethyluridine, 1-taurinomethyl-pseudouridine, 5-taurinomethyl-2-thio-uridine, 1-taurinomethyl-4-thio-uridine, 5-methyl-uridine, 1-methyl-pseudouridine, 4-thio-1-methyl-pseudouridine, 2-thio-1-methyl-pseudouridine, 1-methyl-1-deaza-pseudouridine, 2-thio-1-methyl-1-deaza-pseudouridine, dihydrouridine, dihydropseudouridine, 2-thio-dihydrouridine, 2-thio-dihydropseudouridine, 2-methoxyuridine, 2-methoxy-4-thio-uridine, 4-methoxy-pseudouridine, 4-methoxy-2-thio-pseudouridine, 5-aza-cytidine, pseudoisocytidine, 3-methyl-cytidine, N4-acetylcytidine, 5-formylcytidine, N4-methylcytidine, 5-hydroxymethylcytidine, 1-methyl-pseudoisocytidine, pyrrolo-cytidine, pyrrolo-pseudoisocytidine, 2-thio-cytidine, 2-thio-5-methyl-cytidine, 4-thio-pseudoisocytidine, 4-thio-1-methyl-pseudoisocytidine, 4-thio-1-methyl-1-deaza-pseudoisocytidine, 1-methyl-1-deaza-pseudoisocytidine, zebularine, 5-aza-zebularine, 5-methyl-zebularine, 5-aza-2-thio-zebularine, 2-thio-zebularine, 2-methoxy-cytidine, 2-methoxy-5-methyl-cytidine, 4-methoxy-pseudoisocytidine, 4-methoxy-1-methyl-pseudoisocytidine, 2-aminopurine, 2,6-diaminopurine, 7-deaza-adenine, 7-deaza-8-aza-adenine, 7-deaza-2-aminopurine, 7-deaza-8-aza-2-aminopurine, 7-deaza-2,6-diaminopurine, 7-deaza-8-aza-2,6-diaminopurine, 1-methyladenosine, N6-methyladenosine, N6-isopentenyladenosine, N6-(cis-hydroxyisopentenyl)adenosine, 2-methylthio-N6-(cis-hydroxyisopentenyl) adenosine, N6-glycinylcarbamoyladenosine, N6-threonylcarbamoyladenosine, 2-methylthio-N6-threonyl carbamoyladenosine, N6,N6-dimethyladenosine, 7-methyladenine, 2-methylthio-adenine, 2-methoxy-adenine, inosine, 1-methyl-inosine, wyosine, wybutosine, 7-deaza-guanosine, 7-deaza-8-aza-guanosine, 6-thio-guanosine, 6-thio-7-deaza-guanosine, 6-thio-7-deaza-8-aza-guanosine, 7-methyl-guanosine, 6-thio-7-methyl-guanosine, 7-methylinosine, 6-methoxy-guanosine, 1-methylguanosine, N2-methylguanosine, N2,N2-dimethylguanosine, 8-oxo-guanosine, 7-methyl-8-oxo-guanosine, 1-methyl-6-thio-guanosine, N2-methyl-6-thio-guanosine, and N2,N2-dimethyl-6-thio-guanosine.

8. The pharmaceutical composition of claim 1, wherein the composition is suitable for administration selected from the group consisting of, systemic, local, intravenous, topical, oral, administration via a dressing, administration via a bandage, rectal, vaginal, intramuscular, transarterial, intraperitoneal, intranasally, subcutaneously, endoscopically, transdermally and intrathecally.

9. The pharmaceutical composition of claim 8, wherein the administration is intravenous.

10. The pharmaceutical composition of claim 8, wherein the administration is repeated at least once.

11. The pharmaceutical composition of claim 1, wherein the anti-viral polypeptide is a secreted polypeptide.

12. The pharmaceutical composition of claim 1, wherein the anti-viral polypeptide is useful in a treatment of an infection by a viral pathogen selected from the group consisting of human immunodeficiency viruses 1 and 2 (HIV-1 and HIV-2), human T-cell leukemia viruses 1 and 2 (HTLV-1 and HTLV-2), respiratory syncytial virus (RSV), human papilloma virus (HPV), adenovirus, hepatitis B virus (HBV), hepatitis C virus (HCV), Epstein-Barr virus (EBV), varicella zoster virus (VZV), cytomegalovirus (CMV), herpes simplex viruses 1 and 2 (HSV-1 and HSV-2), human herpes virus 8 (HHV-8), Yellow Fever virus, Dengue virus, Japanese Encephalitis and West Nile viruses.

13. The pharmaceutical composition of claim 1, wherein the anti-viral polypeptide is selected from the group consisting of SEQ ID NOs: 1-1762.

14. The pharmaceutical composition of claim 1, further comprising a lipid-based transfection reagent.

15. A method to treat a viral infection, comprising administering to a subject the pharmaceutical composition of claim 1.

16. The method of claim 15 wherein the viral infection is caused by a viral pathogen selected from the group consisting of human immunodeficiency viruses 1 and 2 (HIV-1 and HIV-2), human T-cell leukemia viruses 1 and 2 (HTLV-1 and HTLV-2), respiratory syncytial virus (RSV), human papilloma virus (HPV), adenovirus, hepatitis B virus (HBV), hepatitis C virus (HCV), Epstein-Barr virus (EBV), varicella zoster virus (VZV), cytomegalovirus (CMV), herpes simplex viruses 1 and 2 (HSV-1 and HSV-2), human herpes virus 8 (HHV-8), Yellow Fever virus, Dengue virus, Japanese Encephalitis and West Nile viruses.

17. The method of claim 15, wherein the subject is human.

18. The method of claim 15, wherein the subject is a livestock animal.

19. The method of claim 15, wherein the pharmaceutical composition is administered by a route selected from the group consisting of systemic, local, intravenous, topical, oral, administration via a dressing, administration via a bandage, rectal, vaginal, intramuscular, transarterial, intraperitoneal, intranasally, subcutaneously, endoscopically, transdermally and intrathecally.

20. The method of claim 19, wherein the route is intravenous.

21. The method of claim 19, wherein the administration is repeated at least once.

22. The method of claim 15, further comprising administering an effective amount of a small molecule anti-viral compound to the subject at the same time or at a different time from the administration of the pharmaceutical composition.

23. A kit, comprising the pharmaceutical composition of claim 1, and packaging and instructions for use thereof.
